United States Patent Application Publication US 2026/0062450 A1 - sequence listing, part 4

SEQ ID NO: 120188 - protein, 10 aa, synthetic construct
AQPRGDLLLS

SEQ ID NO: 120189 - protein, 10 aa, synthetic construct
AQLRGDLLLS

SEQ ID NO: 120190 - protein, 10 aa, synthetic construct
AQIRGDLLLS

SEQ ID NO: 120191 - protein, 10 aa, synthetic construct
AQMRGDLLLS

SEQ ID NO: 120192 - protein, 10 aa, synthetic construct
AQWRGDLLLS

SEQ ID NO: 120193 - protein, 10 aa, synthetic construct
AQFRGDLLLS

SEQ ID NO: 120194 - protein, 10 aa, synthetic construct
AQKRGDLLLS

SEQ ID NO: 120195 - protein, 10 aa, synthetic construct
AQRRGDLLLS

SEQ ID NO: 120196 - protein, 10 aa, synthetic construct
AQHRGDLLLS

SEQ ID NO: 120197 - protein, 10 aa, synthetic construct
AQSRGDLLLS

SEQ ID NO: 120198 - protein, 10 aa, synthetic construct
AQTRGDLLLS

SEQ ID NO: 120199 - protein, 10 aa, synthetic construct
AQYRGDLLLS

SEQ ID NO: 120200 - protein, 10 aa, synthetic construct
AQNRGDLLLS

SEQ ID NO: 120201 - protein, 10 aa, synthetic construct
AQQRGDLLLS

SEQ ID NO: 120202 - protein, 10 aa, synthetic construct
AQDRGDLLLS

SEQ ID NO: 120203 - protein, 10 aa, synthetic construct
AQERGDLLLS

SEQ ID NO: 120204 - protein, 10 aa, synthetic construct
ADGRGDLLLS

SEQ ID NO: 120205 - protein, 10 aa, synthetic construct
ADARGDLLLS

SEQ ID NO: 120206 - protein, 10 aa, synthetic construct
ADVRGDLLLS

SEQ ID NO: 120207 - protein, 10 aa, synthetic construct
ADPRGDLLLS

SEQ ID NO: 120208 - protein, 10 aa, synthetic construct
ADLRGDLLLS

SEQ ID NO: 120209 - protein, 10 aa, synthetic construct
ADIRGDLLLS

SEQ ID NO: 120210 - protein, 10 aa, synthetic construct
ADMRGDLLLS

SEQ ID NO: 120211 - protein, 10 aa, synthetic construct
ADWRGDLLLS

SEQ ID NO: 120212 - protein, 10 aa, synthetic construct
ADFRGDLLLS

SEQ ID NO: 120213 - protein, 10 aa, synthetic construct
ADKRGDLLLS

SEQ ID NO: 120214 - protein, 10 aa, synthetic construct
ADRRGDLLLS

SEQ ID NO: 120215 - protein, 10 aa, synthetic construct
ADHRGDLLLS

SEQ ID NO: 120216 - protein, 10 aa, synthetic construct
ADSRGDLLLS

SEQ ID NO: 120217 - protein, 10 aa, synthetic construct
ADTRGDLLLS

SEQ ID NO: 120218 - protein, 10 aa, synthetic construct
ADYRGDLLLS

SEQ ID NO: 120219 - protein, 10 aa, synthetic construct
ADNRGDLLLS

SEQ ID NO: 120220 - protein, 10 aa, synthetic construct
ADQRGDLLLS

SEQ ID NO: 120221 - protein, 10 aa, synthetic construct
ADDRGDLLLS

SEQ ID NO: 120222 - protein, 10 aa, synthetic construct
ADERGDLLLS

SEQ ID NO: 120223 - protein, 10 aa, synthetic construct
AEGRGDLLLS

SEQ ID NO: 120224 - protein, 10 aa, synthetic construct
AEARGDLLLS

SEQ ID NO: 120225 - protein, 10 aa, synthetic construct
AEVRGDLLLS

SEQ ID NO: 120226 - protein, 10 aa, synthetic construct
AEPRGDLLLS

SEQ ID NO: 120227 - protein, 10 aa, synthetic construct
AELRGDLLLS

SEQ ID NO: 120228 - protein, 10 aa, synthetic construct
AEIRGDLLLS

SEQ ID NO: 120229 - protein, 10 aa, synthetic construct
AEMRGDLLLS

SEQ ID NO: 120230 - protein, 10 aa, synthetic construct
AEWRGDLLLS

SEQ ID NO: 120231 - protein, 10 aa, synthetic construct
AEFRGDLLLS

SEQ ID NO: 120232 - protein, 10 aa, synthetic construct
AEKRGDLLLS

SEQ ID NO: 120233 - protein, 10 aa, synthetic construct
AERRGDLLLS

SEQ ID NO: 120234 - protein, 10 aa, synthetic construct
AEHRGDLLLS

SEQ ID NO: 120235 - protein, 10 aa, synthetic construct
AESRGDLLLS

SEQ ID NO: 120236 - protein, 10 aa, synthetic construct
AETRGDLLLS

SEQ ID NO: 120237 - protein, 10 aa, synthetic construct
AEYRGDLLLS

SEQ ID NO: 120238 - protein, 10 aa, synthetic construct
AENRGDLLLS

SEQ ID NO: 120239 - protein, 10 aa, synthetic construct
AEQRGDLLLS

SEQ ID NO: 120240 - protein, 10 aa, synthetic construct
AEDRGDLLLS

SEQ ID NO: 120241 - protein, 10 aa, synthetic construct
AEERGDLLLS

SEQ ID NO: 120242 - protein, 10 aa, synthetic construct
EGGRGDLLLS

SEQ ID NO: 120243 - protein, 10 aa, synthetic construct
EGARGDLLLS

SEQ ID NO: 120244 - protein, 10 aa, synthetic construct
EGVRGDLLLS

SEQ ID NO: 120245 - protein, 10 aa, synthetic construct
EGPRGDLLLS

SEQ ID NO: 120246 - protein, 10 aa, synthetic construct
EGLRGDLLLS

SEQ ID NO: 120247 - protein, 10 aa, synthetic construct
EGIRGDLLLS

SEQ ID NO: 120248 - protein, 10 aa, synthetic construct
EGMRGDLLLS

SEQ ID NO: 120249 - protein, 10 aa, synthetic construct
EGWRGDLLLS

SEQ ID NO: 120250 - protein, 10 aa, synthetic construct
EGFRGDLLLS

SEQ ID NO: 120251 - protein, 10 aa, synthetic construct
EGKRGDLLLS

SEQ ID NO: 120252 - protein, 10 aa, synthetic construct
EGRRGDLLLS

SEQ ID NO: 120253 - protein, 10 aa, synthetic construct
EGHRGDLLLS

SEQ ID NO: 120254 - protein, 10 aa, synthetic construct
EGSRGDLLLS

SEQ ID NO: 120255 - protein, 10 aa, synthetic construct
EGTRGDLLLS

SEQ ID NO: 120256 - protein, 10 aa, synthetic construct
EGYRGDLLLS

SEQ ID NO: 120257 - protein, 10 aa, synthetic construct
EGNRGDLLLS

SEQ ID NO: 120258 - protein, 10 aa, synthetic construct
EGQRGDLLLS

SEQ ID NO: 120259 - protein, 10 aa, synthetic construct
EGDRGDLLLS

SEQ ID NO: 120260 - protein, 10 aa, synthetic construct
EGERGDLLLS

SEQ ID NO: 120261 - protein, 10 aa, synthetic construct
EAGRGDLLLS

SEQ ID NO: 120262 - protein, 10 aa, synthetic construct
EAARGDLLLS

SEQ ID NO: 120263 - protein, 10 aa, synthetic construct
EAVRGDLLLS

SEQ ID NO: 120264 - protein, 10 aa, synthetic construct
EAPRGDLLLS

SEQ ID NO: 120265 - protein, 10 aa, synthetic construct
EALRGDLLLS

SEQ ID NO: 120266 - protein, 10 aa, synthetic construct
EAIRGDLLLS

SEQ ID NO: 120267 - protein, 10 aa, synthetic construct
EAMRGDLLLS

SEQ ID NO: 120268 - protein, 10 aa, synthetic construct
EAWRGDLLLS

SEQ ID NO: 120269 - protein, 10 aa, synthetic construct
EAFRGDLLLS

SEQ ID NO: 120270 - protein, 10 aa, synthetic construct
EAKRGDLLLS

SEQ ID NO: 120271 - protein, 10 aa, synthetic construct
EARRGDLLLS

SEQ ID NO: 120272 - protein, 10 aa, synthetic construct
EAHRGDLLLS

SEQ ID NO: 120273 - protein, 10 aa, synthetic construct
EASRGDLLLS

SEQ ID NO: 120274 - protein, 10 aa, synthetic construct
EATRGDLLLS

SEQ ID NO: 120275 - protein, 10 aa, synthetic construct
EAYRGDLLLS

SEQ ID NO: 120276 - protein, 10 aa, synthetic construct
EANRGDLLLS

SEQ ID NO: 120277 - protein, 10 aa, synthetic construct
EAQRGDLLLS

SEQ ID NO: 120278 - protein, 10 aa, synthetic construct
EADRGDLLLS

SEQ ID NO: 120279 - protein, 10 aa, synthetic construct
EAERGDLLLS

SEQ ID NO: 120280 - protein, 10 aa, synthetic construct
EVGRGDLLLS

SEQ ID NO: 120281 - protein, 10 aa, synthetic construct
EVARGDLLLS

SEQ ID NO: 120282 - protein, 10 aa, synthetic construct
EVVRGDLLLS

SEQ ID NO: 120283 - protein, 10 aa, synthetic construct
EVPRGDLLLS

SEQ ID NO: 120284 - protein, 10 aa, synthetic construct
EVLRGDLLLS

SEQ ID NO: 120285 - protein, 10 aa, synthetic construct
EVIRGDLLLS

SEQ ID NO: 120286 - protein, 10 aa, synthetic construct
EVMRGDLLLS

SEQ ID NO: 120287 - protein, 10 aa, synthetic construct
EVWRGDLLLS

SEQ ID NO: 120288 - protein, 10 aa, synthetic construct
EVFRGDLLLS

SEQ ID NO: 120289 - protein, 10 aa, synthetic construct
EVKRGDLLLS

SEQ ID NO: 120290 - protein, 10 aa, synthetic construct
EVRRGDLLLS

SEQ ID NO: 120291 - protein, 10 aa, synthetic construct
EVHRGDLLLS

SEQ ID NO: 120292 - protein, 10 aa, synthetic construct
EVSRGDLLLS

SEQ ID NO: 120293 - protein, 10 aa, synthetic construct
EVTRGDLLLS

SEQ ID NO: 120294 - protein, 10 aa, synthetic construct
EVYRGDLLLS

SEQ ID NO: 120295 - protein, 10 aa, synthetic construct
EVNRGDLLLS

SEQ ID NO: 120296 - protein, 10 aa, synthetic construct
EVQRGDLLLS

SEQ ID NO: 120297 - protein, 10 aa, synthetic construct
EVDRGDLLLS

SEQ ID NO: 120298 - protein, 10 aa, synthetic construct
EVERGDLLLS

SEQ ID NO: 120299 - protein, 10 aa, synthetic construct
EPGRGDLLLS

SEQ ID NO: 120300 - protein, 10 aa, synthetic construct
EPARGDLLLS

SEQ ID NO: 120301 - protein, 10 aa, synthetic construct
EPVRGDLLLS

SEQ ID NO: 120302 - protein, 10 aa, synthetic construct
EPPRGDLLLS

SEQ ID NO: 120303 - protein, 10 aa, synthetic construct
EPLRGDLLLS

SEQ ID NO: 120304 - protein, 10 aa, synthetic construct
EPIRGDLLLS

SEQ ID NO: 120305 - protein, 10 aa, synthetic construct
EPMRGDLLLS

SEQ ID NO: 120306 - protein, 10 aa, synthetic construct
EPWRGDLLLS

SEQ ID NO: 120307 - protein, 10 aa, synthetic construct
EPFRGDLLLS

SEQ ID NO: 120308 - protein, 10 aa, synthetic construct
EPKRGDLLLS

SEQ ID NO: 120309 - protein, 10 aa, synthetic construct
EPRRGDLLLS

SEQ ID NO: 120310 - protein, 10 aa, synthetic construct
EPHRGDLLLS

SEQ ID NO: 120311 - protein, 10 aa, synthetic construct
EPSRGDLLLS

SEQ ID NO: 120312 - protein, 10 aa, synthetic construct
EPTRGDLLLS

SEQ ID NO: 120313 - protein, 10 aa, synthetic construct
EPYRGDLLLS

SEQ ID NO: 120314 - protein, 10 aa, synthetic construct
EPNRGDLLLS

SEQ ID NO: 120315 - protein, 10 aa, synthetic construct
EPQRGDLLLS

SEQ ID NO: 120316 - protein, 10 aa, synthetic construct
EPDRGDLLLS

SEQ ID NO: 120317 - protein, 10 aa, synthetic construct
EPERGDLLLS

SEQ ID NO: 120318 - protein, 10 aa, synthetic construct
ELGRGDLLLS

SEQ ID NO: 120319 - protein, 10 aa, synthetic construct
ELARGDLLLS

SEQ ID NO: 120320 - protein, 10 aa, synthetic construct
ELVRGDLLLS

SEQ ID NO: 120321 - protein, 10 aa, synthetic construct
ELPRGDLLLS

SEQ ID NO: 120322 - protein, 10 aa, synthetic construct
ELLRGDLLLS

SEQ ID NO: 120323 - protein, 10 aa, synthetic construct
ELIRGDLLLS

SEQ ID NO: 120324 - protein, 10 aa, synthetic construct
ELMRGDLLLS

SEQ ID NO: 120325 - protein, 10 aa, synthetic construct
ELWRGDLLLS

SEQ ID NO: 120326 - protein, 10 aa, synthetic construct
ELFRGDLLLS

SEQ ID NO: 120327 - protein, 10 aa, synthetic construct
ELKRGDLLLS

SEQ ID NO: 120328 - protein, 10 aa, synthetic construct
ELRRGDLLLS

SEQ ID NO: 120329 - protein, 10 aa, synthetic construct
ELHRGDLLLS

SEQ ID NO: 120330 - protein, 10 aa, synthetic construct
ELSRGDLLLS

SEQ ID NO: 120331 - protein, 10 aa, synthetic construct
ELTRGDLLLS

SEQ ID NO: 120332 - protein, 10 aa, synthetic construct
ELYRGDLLLS

SEQ ID NO: 120333 - protein, 10 aa, synthetic construct
ELNRGDLLLS

SEQ ID NO: 120334 - protein, 10 aa, synthetic construct
ELQRGDLLLS

SEQ ID NO: 120335 - protein, 10 aa, synthetic construct
ELDRGDLLLS

SEQ ID NO: 120336 - protein, 10 aa, synthetic construct
ELERGDLLLS

SEQ ID NO: 120337 - protein, 10 aa, synthetic construct
EIGRGDLLLS

SEQ ID NO: 120338 - protein, 10 aa, synthetic construct
EIARGDLLLS

SEQ ID NO: 120339 - protein, 10 aa, synthetic construct
EIVRGDLLLS

SEQ ID NO: 120340 - protein, 10 aa, synthetic construct
EIPRGDLLLS

SEQ ID NO: 120341 - protein, 10 aa, synthetic construct
EILRGDLLLS

SEQ ID NO: 120342 - protein, 10 aa, synthetic construct
EIIRGDLLLS

SEQ ID NO: 120343 - protein, 10 aa, synthetic construct
EIMRGDLLLS

SEQ ID NO: 120344 - protein, 10 aa, synthetic construct
EIWRGDLLLS

SEQ ID NO: 120345 - protein, 10 aa, synthetic construct
EIFRGDLLLS

SEQ ID NO: 120346 - protein, 10 aa, synthetic construct
EIKRGDLLLS

SEQ ID NO: 120347 - protein, 10 aa, synthetic construct
EIRRGDLLLS

SEQ ID NO: 120348 - protein, 10 aa, synthetic construct
EIHRGDLLLS

SEQ ID NO: 120349 - protein, 10 aa, synthetic construct
EISRGDLLLS

SEQ ID NO: 120350 - protein, 10 aa, synthetic construct
EITRGDLLLS

SEQ ID NO: 120351 - protein, 10 aa, synthetic construct
EIYRGDLLLS

SEQ ID NO: 120352 - protein, 10 aa, synthetic construct
EINRGDLLLS

SEQ ID NO: 120353 - protein, 10 aa, synthetic construct
EIQRGDLLLS

SEQ ID NO: 120354 - protein, 10 aa, synthetic construct
EIDRGDLLLS

SEQ ID NO: 120355 - protein, 10 aa, synthetic construct
EIERGDLLLS

SEQ ID NO: 120356 - protein, 10 aa, synthetic construct
EMGRGDLLLS

SEQ ID NO: 120357 - protein, 10 aa, synthetic construct
EMARGDLLLS

SEQ ID NO: 120358 - protein, 10 aa, synthetic construct
EMVRGDLLLS

SEQ ID NO: 120359 - protein, 10 aa, synthetic construct
EMPRGDLLLS

SEQ ID NO: 120360 - protein, 10 aa, synthetic construct
EMLRGDLLLS

SEQ ID NO: 120361 - protein, 10 aa, synthetic construct
EMIRGDLLLS

SEQ ID NO: 120362 - protein, 10 aa, synthetic construct
EMMRGDLLLS

SEQ ID NO: 120363 - protein, 10 aa, synthetic construct
EMWRGDLLLS

SEQ ID NO: 120364 - protein, 10 aa, synthetic construct
EMFRGDLLLS

SEQ ID NO: 120365 - protein, 10 aa, synthetic construct
EMKRGDLLLS

SEQ ID NO: 120366 - protein, 10 aa, synthetic construct
EMRRGDLLLS

SEQ ID NO: 120367 - protein, 10 aa, synthetic construct
EMHRGDLLLS

SEQ ID NO: 120368 - protein, 10 aa, synthetic construct
EMSRGDLLLS

SEQ ID NO: 120369 - protein, 10 aa, synthetic construct
EMTRGDLLLS

SEQ ID NO: 120370 - protein, 10 aa, synthetic construct
EMYRGDLLLS

SEQ ID NO: 120371 - protein, 10 aa, synthetic construct
EMNRGDLLLS

SEQ ID NO: 120372 - protein, 10 aa, synthetic construct
EMQRGDLLLS

SEQ ID NO: 120373 - protein, 10 aa, synthetic construct
EMDRGDLLLS

SEQ ID NO: 120374 - protein, 10 aa, synthetic construct
EMERGDLLLS

SEQ ID NO: 120375 - protein, 10 aa, synthetic construct
EWGRGDLLLS

SEQ ID NO: 120376 - protein, 10 aa, synthetic construct
EWARGDLLLS

SEQ ID NO: 120377 - protein, 10 aa, synthetic construct
EWVRGDLLLS

SEQ ID NO: 120378 - protein, 10 aa, synthetic construct
EWPRGDLLLS

SEQ ID NO: 120379 - protein, 10 aa, synthetic construct
EWLRGDLLLS

SEQ ID NO: 120380 - protein, 10 aa, synthetic construct
EWIRGDLLLS

SEQ ID NO: 120381 - protein, 10 aa, synthetic construct
EWMRGDLLLS

SEQ ID NO: 120382 - protein, 10 aa, synthetic construct
EWWRGDLLLS

SEQ ID NO: 120383 - protein, 10 aa, synthetic construct
EWFRGDLLLS

SEQ ID NO: 120384 - protein, 10 aa, synthetic construct
EWKRGDLLLS

SEQ ID NO: 120385 - protein, 10 aa, synthetic construct
EWRRGDLLLS

SEQ ID NO: 120386 - protein, 10 aa, synthetic construct
EWHRGDLLLS

SEQ ID NO: 120387 - protein, 10 aa, synthetic construct
EWSRGDLLLS

SEQ ID NO: 120388 - protein, 10 aa, synthetic construct
EWTRGDLLLS

SEQ ID NO: 120389 - protein, 10 aa, synthetic construct
EWYRGDLLLS

SEQ ID NO: 120390 - protein, 10 aa, synthetic construct
EWNRGDLLLS

SEQ ID NO: 120391 - protein, 10 aa, synthetic construct
EWQRGDLLLS

SEQ ID NO: 120392 - protein, 10 aa, synthetic construct
EWDRGDLLLS

SEQ ID NO: 120393 - protein, 10 aa, synthetic construct
EWERGDLLLS

SEQ ID NO: 120394 - protein, 10 aa, synthetic construct
EFGRGDLLLS

SEQ ID NO: 120395 - protein, 10 aa, synthetic construct
EFARGDLLLS

SEQ ID NO: 120396 - protein, 10 aa, synthetic construct
EFVRGDLLLS

SEQ ID NO: 120397 - protein, 10 aa, synthetic construct
EFPRGDLLLS

SEQ ID NO: 120398 - protein, 10 aa, synthetic construct
EFLRGDLLLS

SEQ ID NO: 120399 - protein, 10 aa, synthetic construct
EFIRGDLLLS

SEQ ID NO: 120400 - protein, 10 aa, synthetic construct
EFMRGDLLLS

SEQ ID NO: 120401 - protein, 10 aa, synthetic construct
EFWRGDLLLS

SEQ ID NO: 120402 - protein, 10 aa, synthetic construct
EFFRGDLLLS

SEQ ID NO: 120403 - protein, 10 aa, synthetic construct
EFKRGDLLLS

SEQ ID NO: 120404 - protein, 10 aa, synthetic construct
EFRRGDLLLS

SEQ ID NO: 120405 - protein, 10 aa, synthetic construct
EFHRGDLLLS

SEQ ID NO: 120406 - protein, 10 aa, synthetic construct
EFSRGDLLLS

SEQ ID NO: 120407 - protein, 10 aa, synthetic construct
EFTRGDLLLS

SEQ ID NO: 120408 - protein, 10 aa, synthetic construct
EFYRGDLLLS

SEQ ID NO: 120409 - protein, 10 aa, synthetic construct
EFNRGDLLLS

SEQ ID NO: 120410 - protein, 10 aa, synthetic construct
EFQRGDLLLS

SEQ ID NO: 120411 - protein, 10 aa, synthetic construct
EFDRGDLLLS

SEQ ID NO: 120412 - protein, 10 aa, synthetic construct
EFERGDLLLS

SEQ ID NO: 120413 - protein, 10 aa, synthetic construct
EKGRGDLLLS

SEQ ID NO: 120414 - protein, 10 aa, synthetic construct
EKARGDLLLS

SEQ ID NO: 120415 - protein, 10 aa, synthetic construct
EKVRGDLLLS

SEQ ID NO: 120416 - protein, 10 aa, synthetic construct
EKPRGDLLLS

SEQ ID NO: 120417 - protein, 10 aa, synthetic construct
EKLRGDLLLS

SEQ ID NO: 120418 - protein, 10 aa, synthetic construct
EKIRGDLLLS

SEQ ID NO: 120419 - protein, 10 aa, synthetic construct
EKMRGDLLLS

SEQ ID NO: 120420 - protein, 10 aa, synthetic construct
EKWRGDLLLS

SEQ ID NO: 120421 - protein, 10 aa, synthetic construct
EKFRGDLLLS

SEQ ID NO: 120422 - protein, 10 aa, synthetic construct
EKKRGDLLLS

SEQ ID NO: 120423 - protein, 10 aa, synthetic construct
EKRRGDLLLS

SEQ ID NO: 120424 - protein, 10 aa, synthetic construct
EKHRGDLLLS

SEQ ID NO: 120425 - protein, 10 aa, synthetic construct
EKSRGDLLLS

SEQ ID NO: 120426 - protein, 10 aa, synthetic construct
EKTRGDLLLS

SEQ ID NO: 120427 - protein, 10 aa, synthetic construct
EKYRGDLLLS

SEQ ID NO: 120428 - protein, 10 aa, synthetic construct
EKNRGDLLLS

SEQ ID NO: 120429 - protein, 10 aa, synthetic construct
EKQRGDLLLS

SEQ ID NO: 120430 - protein, 10 aa, synthetic construct
EKDRGDLLLS

SEQ ID NO: 120431 - protein, 10 aa, synthetic construct
EKERGDLLLS

SEQ ID NO: 120432 - protein, 10 aa, synthetic construct
ERGRGDLLLS

SEQ ID NO: 120433 - protein, 10 aa, synthetic construct
ERARGDLLLS

SEQ ID NO: 120434 - protein, 10 aa, synthetic construct
ERVRGDLLLS

SEQ ID NO: 120435 - protein, 10 aa, synthetic construct
ERPRGDLLLS

SEQ ID NO: 120436 - protein, 10 aa, synthetic construct
ERLRGDLLLS

SEQ ID NO: 120437 - protein, 10 aa, synthetic construct
ERIRGDLLLS

SEQ ID NO: 120438 - protein, 10 aa, synthetic construct
ERMRGDLLLS

SEQ ID NO: 120439 - protein, 10 aa, synthetic construct
ERWRGDLLLS

SEQ ID NO: 120440 - protein, 10 aa, synthetic construct
ERFRGDLLLS

SEQ ID NO: 120441 - protein, 10 aa, synthetic construct
ERKRGDLLLS

SEQ ID NO: 120442 - protein, 10 aa, synthetic construct
ERRRGDLLLS

SEQ ID NO: 120443 - protein, 10 aa, synthetic construct
ERHRGDLLLS

SEQ ID NO: 120444 - protein, 10 aa, synthetic construct
ERSRGDLLLS

SEQ ID NO: 120445 - protein, 10 aa, synthetic construct
ERTRGDLLLS

SEQ ID NO: 120446 - protein, 10 aa, synthetic construct
ERYRGDLLLS

SEQ ID NO: 120447 - protein, 10 aa, synthetic construct
ERNRGDLLLS

SEQ ID NO: 120448 - protein, 10 aa, synthetic construct
ERQRGDLLLS

SEQ ID NO: 120449 - protein, 10 aa, synthetic construct
ERDRGDLLLS

SEQ ID NO: 120450 - protein, 10 aa, synthetic construct
ERERGDLLLS

SEQ ID NO: 120451 - protein, 10 aa, synthetic construct
EHGRGDLLLS

SEQ ID NO: 120452 - protein, 10 aa, synthetic construct
EHARGDLLLS

SEQ ID NO: 120453 - protein, 10 aa, synthetic construct
EHVRGDLLLS

SEQ ID NO: 120454 - protein, 10 aa, synthetic construct
EHPRGDLLLS

SEQ ID NO: 120455 - protein, 10 aa, synthetic construct
EHLRGDLLLS

SEQ ID NO: 120456 - protein, 10 aa, synthetic construct
EHIRGDLLLS

SEQ ID NO: 120457 - protein, 10 aa, synthetic construct
EHMRGDLLLS

SEQ ID NO: 120458 - protein, 10 aa, synthetic construct
EHWRGDLLLS

SEQ ID NO: 120459 - protein, 10 aa, synthetic construct
EHFRGDLLLS

SEQ ID NO: 120460 - protein, 10 aa, synthetic construct
EHKRGDLLLS

SEQ ID NO: 120461 - protein, 10 aa, synthetic construct
EHRRGDLLLS

SEQ ID NO: 120462 - protein, 10 aa, synthetic construct
EHHRGDLLLS

SEQ ID NO: 120463 - protein, 10 aa, synthetic construct
EHSRGDLLLS

SEQ ID NO: 120464 - protein, 10 aa, synthetic construct
EHTRGDLLLS

SEQ ID NO: 120465 - protein, 10 aa, synthetic construct
EHYRGDLLLS

SEQ ID NO: 120466 - protein, 10 aa, synthetic construct
EHNRGDLLLS

SEQ ID NO: 120467 - protein, 10 aa, synthetic construct
EHQRGDLLLS

SEQ ID NO: 120468 - protein, 10 aa, synthetic construct
EHDRGDLLLS

SEQ ID NO: 120469 - protein, 10 aa, synthetic construct
EHERGDLLLS

SEQ ID NO: 120470 - protein, 10 aa, synthetic construct
ESGRGDLLLS

SEQ ID NO: 120471 - protein, 10 aa, synthetic construct
ESARGDLLLS

SEQ ID NO: 120472 - protein, 10 aa, synthetic construct
ESVRGDLLLS

SEQ ID NO: 120473 - protein, 10 aa, synthetic construct
ESPRGDLLLS

SEQ ID NO: 120474 - protein, 10 aa, synthetic construct
ESLRGDLLLS

SEQ ID NO: 120475 - protein, 10 aa, synthetic construct
ESIRGDLLLS

SEQ ID NO: 120476 - protein, 10 aa, synthetic construct
ESMRGDLLLS

SEQ ID NO: 120477 - protein, 10 aa, synthetic construct
ESWRGDLLLS

SEQ ID NO: 120478 - protein, 10 aa, synthetic construct
ESFRGDLLLS

SEQ ID NO: 120479 - protein, 10 aa, synthetic construct
ESKRGDLLLS

SEQ ID NO: 120480 - protein, 10 aa, synthetic construct
ESRRGDLLLS

SEQ ID NO: 120481 - protein, 10 aa, synthetic construct
ESHRGDLLLS

SEQ ID NO: 120482 - protein, 10 aa, synthetic construct
ESSRGDLLLS

SEQ ID NO: 120483 - protein, 10 aa, synthetic construct
ESTRGDLLLS

SEQ ID NO: 120484 - protein, 10 aa, synthetic construct
ESYRGDLLLS

SEQ ID NO: 120485 - protein, 10 aa, synthetic construct
ESNRGDLLLS

SEQ ID NO: 120486 - protein, 10 aa, synthetic construct
ESQRGDLLLS

SEQ ID NO: 120487 - protein, 10 aa, synthetic construct
ESDRGDLLLS

SEQ ID NO: 120488 - protein, 10 aa, synthetic construct
ESERGDLLLS

SEQ ID NO: 120489 - protein, 10 aa, synthetic construct
ETGRGDLLLS

SEQ ID NO: 120490 - protein, 10 aa, synthetic construct
ETARGDLLLS

SEQ ID NO: 120491 - protein, 10 aa, synthetic construct
ETVRGDLLLS

SEQ ID NO: 120492 - protein, 10 aa, synthetic construct
ETPRGDLLLS

SEQ ID NO: 120493 - protein, 10 aa, synthetic construct
ETLRGDLLLS

SEQ ID NO: 120494 - protein, 10 aa, synthetic construct
ETIRGDLLLS

SEQ ID NO: 120495 - protein, 10 aa, synthetic construct
ETMRGDLLLS

SEQ ID NO: 120496 - protein, 10 aa, synthetic construct
ETWRGDLLLS

SEQ ID NO: 120497 - protein, 10 aa, synthetic construct
ETFRGDLLLS

SEQ ID NO: 120498 - protein, 10 aa, synthetic construct
ETKRGDLLLS

SEQ ID NO: 120499 - protein, 10 aa, synthetic construct
ETRRGDLLLS

SEQ ID NO: 120500 - protein, 10 aa, synthetic construct
ETHRGDLLLS

SEQ ID NO: 120501 - protein, 10 aa, synthetic construct
ETSRGDLLLS

SEQ ID NO: 120502 - protein, 10 aa, synthetic construct
ETTRGDLLLS

SEQ ID NO: 120503 - protein, 10 aa, synthetic construct
ETYRGDLLLS

SEQ ID NO: 120504 - protein, 10 aa, synthetic construct
ETNRGDLLLS

SEQ ID NO: 120505 - protein, 10 aa, synthetic construct
ETQRGDLLLS

SEQ ID NO: 120506 - protein, 10 aa, synthetic construct
ETDRGDLLLS

SEQ ID NO: 120507 - protein, 10 aa, synthetic construct
ETERGDLLLS

SEQ ID NO: 120508 - protein, 10 aa, synthetic construct
EYGRGDLLLS

SEQ ID NO: 120509 - protein, 10 aa, synthetic construct
EYARGDLLLS

SEQ ID NO: 120510 - protein, 10 aa, synthetic construct
EYVRGDLLLS

SEQ ID NO: 120511 - protein, 10 aa, synthetic construct
EYPRGDLLLS

SEQ ID NO: 120512 - protein, 10 aa, synthetic construct
EYLRGDLLLS

SEQ ID NO: 120513 - protein, 10 aa, synthetic construct
EYIRGDLLLS

SEQ ID NO: 120514 - protein, 10 aa, synthetic construct
EYMRGDLLLS

SEQ ID NO: 120515 - protein, 10 aa, synthetic construct
EYWRGDLLLS

SEQ ID NO: 120516 - protein, 10 aa, synthetic construct
EYFRGDLLLS

SEQ ID NO: 120517 - protein, 10 aa, synthetic construct
EYKRGDLLLS

SEQ ID NO: 120518 - protein, 10 aa, synthetic construct
EYRRGDLLLS

SEQ ID NO: 120519 - protein, 10 aa, synthetic construct
EYHRGDLLLS

SEQ ID NO: 120520 - protein, 10 aa, synthetic construct
EYSRGDLLLS

SEQ ID NO: 120521 - protein, 10 aa, synthetic construct
EYTRGDLLLS

SEQ ID NO: 120522 - protein, 10 aa, synthetic construct
EYYRGDLLLS

SEQ ID NO: 120523 - protein, 10 aa, synthetic construct
EYNRGDLLLS

SEQ ID NO: 120524 - protein, 10 aa, synthetic construct
EYQRGDLLLS

SEQ ID NO: 120525 - protein, 10 aa, synthetic construct
EYDRGDLLLS

SEQ ID NO: 120526 - protein, 10 aa, synthetic construct
EYERGDLLLS

SEQ ID NO: 120527 - protein, 10 aa, synthetic construct
ENGRGDLLLS

SEQ ID NO: 120528 - protein, 10 aa, synthetic construct
ENARGDLLLS

SEQ ID NO: 120529 - protein, 10 aa, synthetic construct
ENVRGDLLLS

SEQ ID NO: 120530 - protein, 10 aa, synthetic construct
ENPRGDLLLS

SEQ ID NO: 120531 - protein, 10 aa, synthetic construct
ENLRGDLLLS

SEQ ID NO: 120532 - protein, 10 aa, synthetic construct
ENIRGDLLLS

SEQ ID NO: 120533 - protein, 10 aa, synthetic construct
ENMRGDLLLS

SEQ ID NO: 120534 - protein, 10 aa, synthetic construct
ENWRGDLLLS

SEQ ID NO: 120535 - protein, 10 aa, synthetic construct
ENFRGDLLLS

SEQ ID NO: 120536 - protein, 10 aa, synthetic construct
ENKRGDLLLS

SEQ ID NO: 120537 - protein, 10 aa, synthetic construct
ENRRGDLLLS

SEQ ID NO: 120538 - protein, 10 aa, synthetic construct
ENHRGDLLLS

SEQ ID NO: 120539 - protein, 10 aa, synthetic construct
ENSRGDLLLS

SEQ ID NO: 120540 - protein, 10 aa, synthetic construct
ENTRGDLLLS

SEQ ID NO: 120541 - protein, 10 aa, synthetic construct
ENYRGDLLLS

SEQ ID NO: 120542 - protein, 10 aa, synthetic construct
ENNRGDLLLS

SEQ ID NO: 120543 - protein, 10 aa, synthetic construct
ENQRGDLLLS

SEQ ID NO: 120544 - protein, 10 aa, synthetic construct
ENDRGDLLLS

SEQ ID NO: 120545 - protein, 10 aa, synthetic construct
ENERGDLLLS

SEQ ID NO: 120546 - protein, 10 aa, synthetic construct
EQGRGDLLLS

SEQ ID NO: 120547 - protein, 10 aa, synthetic construct
EQARGDLLLS

SEQ ID NO: 120548 - protein, 10 aa, synthetic construct
EQVRGDLLLS

SEQ ID NO: 120549 - protein, 10 aa, synthetic construct
EQPRGDLLLS

SEQ ID NO: 120550 - protein, 10 aa, synthetic construct
EQLRGDLLLS

SEQ ID NO: 120551 - protein, 10 aa, synthetic construct
EQIRGDLLLS

SEQ ID NO: 120552 - protein, 10 aa, synthetic construct
EQMRGDLLLS

SEQ ID NO: 120553 - protein, 10 aa, synthetic construct
EQWRGDLLLS

SEQ ID NO: 120554 - protein, 10 aa, synthetic construct
EQFRGDLLLS

SEQ ID NO: 120555 - protein, 10 aa, synthetic construct
EQKRGDLLLS

SEQ ID NO: 120556 - protein, 10 aa, synthetic construct
EQRRGDLLLS

SEQ ID NO: 120557 - protein, 10 aa, synthetic construct
EQHRGDLLLS

SEQ ID NO: 120558 - protein, 10 aa, synthetic construct
EQSRGDLLLS

SEQ ID NO: 120559 - protein, 10 aa, synthetic construct
EQTRGDLLLS

SEQ ID NO: 120560 - protein, 10 aa, synthetic construct
EQYRGDLLLS

SEQ ID NO: 120561 - protein, 10 aa, synthetic construct
EQNRGDLLLS

SEQ ID NO: 120562 - protein, 10 aa, synthetic construct
EQQRGDLLLS

SEQ ID NO: 120563 - protein, 10 aa, synthetic construct
EQDRGDLLLS

SEQ ID NO: 120564 - protein, 10 aa, synthetic construct
EQERGDLLLS

SEQ ID NO: 120565 - protein, 10 aa, synthetic construct
EDGRGDLLLS

SEQ ID NO: 120566 - protein, 10 aa, synthetic construct
EDARGDLLLS

SEQ ID NO: 120567 - protein, 10 aa, synthetic construct
EDVRGDLLLS

SEQ ID NO: 120568 - protein, 10 aa, synthetic construct
EDPRGDLLLS

SEQ ID NO: 120569 - protein, 10 aa, synthetic construct
EDLRGDLLLS

SEQ ID NO: 120570 - protein, 10 aa, synthetic construct
EDIRGDLLLS

SEQ ID NO: 120571 - protein, 10 aa, synthetic construct
EDMRGDLLLS

SEQ ID NO: 120572 - protein, 10 aa, synthetic construct
EDWRGDLLLS

SEQ ID NO: 120573 - protein, 10 aa, synthetic construct
EDFRGDLLLS

SEQ ID NO: 120574 - protein, 10 aa, synthetic construct
EDKRGDLLLS

SEQ ID NO: 120575 - protein, 10 aa, synthetic construct
EDRRGDLLLS

SEQ ID NO: 120576 - protein, 10 aa, synthetic construct
EDHRGDLLLS

SEQ ID NO: 120577 - protein, 10 aa, synthetic construct
EDSRGDLLLS

SEQ ID NO: 120578 - protein, 10 aa, synthetic construct
EDTRGDLLLS

SEQ ID NO: 120579 - protein, 10 aa, synthetic construct
EDYRGDLLLS

SEQ ID NO: 120580 - protein, 10 aa, synthetic construct
EDNRGDLLLS

SEQ ID NO: 120581 - protein, 10 aa, synthetic construct
EDQRGDLLLS

SEQ ID NO: 120582 - protein, 10 aa, synthetic construct
EDDRGDLLLS

SEQ ID NO: 120583 - protein, 10 aa, synthetic construct
EDERGDLLLS

SEQ ID NO: 120584 - protein, 10 aa, synthetic construct
EEGRGDLLLS

SEQ ID NO: 120585 - protein, 10 aa, synthetic construct
EEARGDLLLS

SEQ ID NO: 120586 - protein, 10 aa, synthetic construct
EEVRGDLLLS

SEQ ID NO: 120587 - protein, 10 aa, synthetic construct
EEPRGDLLLS

SEQ ID NO: 120588 - protein, 10 aa, synthetic construct
EELRGDLLLS

SEQ ID NO: 120589 - protein, 10 aa, synthetic construct
EEIRGDLLLS

SEQ ID NO: 120590 - protein, 10 aa, synthetic construct
EEMRGDLLLS

SEQ ID NO: 120591 - protein, 10 aa, synthetic construct
EEWRGDLLLS

SEQ ID NO: 120592 - protein, 10 aa, synthetic construct
EEFRGDLLLS

SEQ ID NO: 120593 - protein, 10 aa, synthetic construct
EEKRGDLLLS

SEQ ID NO: 120594 - protein, 10 aa, synthetic construct
EERRGDLLLS

SEQ ID NO: 120595 - protein, 10 aa, synthetic construct
EEHRGDLLLS

SEQ ID NO: 120596 - protein, 10 aa, synthetic construct
EESRGDLLLS

SEQ ID NO: 120597 - protein, 10 aa, synthetic construct
EETRGDLLLS

SEQ ID NO: 120598 - protein, 10 aa, synthetic construct
EEYRGDLLLS

SEQ ID NO: 120599 - protein, 10 aa, synthetic construct
EENRGDLLLS

SEQ ID NO: 120600 - protein, 10 aa, synthetic construct
EEQRGDLLLS

SEQ ID NO: 120601 - protein, 10 aa, synthetic construct
EEDRGDLLLS

SEQ ID NO: 120602 - protein, 10 aa, synthetic construct
EEERGDLLLS

SEQ ID NO: 120603 - protein, 10 aa, synthetic construct
NGGRGDLLLS

SEQ ID NO: 120604 - protein, 10 aa, synthetic construct
NGARGDLLLS

SEQ ID NO: 120605 - protein, 10 aa, synthetic construct
NGVRGDLLLS

SEQ ID NO: 120606 - protein, 10 aa, synthetic construct
NGPRGDLLLS

SEQ ID NO: 120607 - protein, 10 aa, synthetic construct
NGLRGDLLLS

SEQ ID NO: 120608 - protein, 10 aa, synthetic construct
NGIRGDLLLS

SEQ ID NO: 120609 - protein, 10 aa, synthetic construct
NGMRGDLLLS

SEQ ID NO: 120610 - protein, 10 aa, synthetic construct
NGWRGDLLLS

SEQ ID NO: 120611 - protein, 10 aa, synthetic construct
NGFRGDLLLS

SEQ ID NO: 120612 - protein, 10 aa, synthetic construct
NGKRGDLLLS

SEQ ID NO: 120613 - protein, 10 aa, synthetic construct
NGRRGDLLLS

SEQ ID NO: 120614 - protein, 10 aa, synthetic construct
NGHRGDLLLS

SEQ ID NO: 120615 - protein, 10 aa, synthetic construct
NGSRGDLLLS

SEQ ID NO: 120616 - protein, 10 aa, synthetic construct
NGTRGDLLLS

SEQ ID NO: 120617 - protein, 10 aa, synthetic construct
NGYRGDLLLS

SEQ ID NO: 120618 - protein, 10 aa, synthetic construct
NGNRGDLLLS

SEQ ID NO: 120619 - protein, 10 aa, synthetic construct
NGQRGDLLLS

SEQ ID NO: 120620 - protein, 10 aa, synthetic construct
NGDRGDLLLS

SEQ ID NO: 120621 - protein, 10 aa, synthetic construct
NGERGDLLLS

SEQ ID NO: 120622 - protein, 10 aa, synthetic construct
NAGRGDLLLS

SEQ ID NO: 120623 - protein, 10 aa, synthetic construct
NAARGDLLLS

SEQ ID NO: 120624 - protein, 10 aa, synthetic construct
NAVRGDLLLS

SEQ ID NO: 120625 - protein, 10 aa, synthetic construct
NAPRGDLLLS

SEQ ID NO: 120626 - protein, 10 aa, synthetic construct
NALRGDLLLS

SEQ ID NO: 120627 - protein, 10 aa, synthetic construct
NAIRGDLLLS

SEQ ID NO: 120628 - protein, 10 aa, synthetic construct
NAMRGDLLLS

SEQ ID NO: 120629 - protein, 10 aa, synthetic construct
NAWRGDLLLS

SEQ ID NO: 120630 - protein, 10 aa, synthetic construct
NAFRGDLLLS

SEQ ID NO: 120631 - protein, 10 aa, synthetic construct
NAKRGDLLLS

SEQ ID NO: 120632 - protein, 10 aa, synthetic construct
NARRGDLLLS

SEQ ID NO: 120633 - protein, 10 aa, synthetic construct
NAHRGDLLLS

SEQ ID NO: 120634 - protein, 10 aa, synthetic construct
NASRGDLLLS

SEQ ID NO: 120635 - protein, 10 aa, synthetic construct
NATRGDLLLS

SEQ ID NO: 120636 - protein, 10 aa, synthetic construct
NAYRGDLLLS

SEQ ID NO: 120637 - protein, 10 aa, synthetic construct
NANRGDLLLS

SEQ ID NO: 120638 - protein, 10 aa, synthetic construct
NAQRGDLLLS

SEQ ID NO: 120639 - protein, 10 aa, synthetic construct
NADRGDLLLS

SEQ ID NO: 120640 - protein, 10 aa, synthetic construct
NAERGDLLLS

SEQ ID NO: 120641 - protein, 10 aa, synthetic construct
NVGRGDLLLS

SEQ ID NO: 120642 - protein, 10 aa, synthetic construct
NVARGDLLLS

SEQ ID NO: 120643 - protein, 10 aa, synthetic construct
NVVRGDLLLS

SEQ ID NO: 120644 - protein, 10 aa, synthetic construct
NVPRGDLLLS

SEQ ID NO: 120645 - protein, 10 aa, synthetic construct
NVLRGDLLLS

SEQ ID NO: 120646 - protein, 10 aa, synthetic construct
NVIRGDLLLS

SEQ ID NO: 120647 - protein, 10 aa, synthetic construct
NVMRGDLLLS

SEQ ID NO: 120648 - protein, 10 aa, synthetic construct
NVWRGDLLLS

SEQ ID NO: 120649 - protein, 10 aa, synthetic construct
NVFRGDLLLS

SEQ ID NO: 120650 - protein, 10 aa, synthetic construct
NVKRGDLLLS

SEQ ID NO: 120651 - protein, 10 aa, synthetic construct
NVRRGDLLLS

SEQ ID NO: 120652 - protein, 10 aa, synthetic construct
NVHRGDLLLS

SEQ ID NO: 120653 - protein, 10 aa, synthetic construct
NVSRGDLLLS

SEQ ID NO: 120654 - protein, 10 aa, synthetic construct
NVTRGDLLLS

SEQ ID NO: 120655 - protein, 10 aa, synthetic construct
NVYRGDLLLS

SEQ ID NO: 120656 - protein, 10 aa, synthetic construct
NVNRGDLLLS

SEQ ID NO: 120657 - protein, 10 aa, synthetic construct
NVQRGDLLLS

SEQ ID NO: 120658 - protein, 10 aa, synthetic construct
NVDRGDLLLS

SEQ ID NO: 120659 - protein, 10 aa, synthetic construct
NVERGDLLLS

SEQ ID NO: 120660 - protein, 10 aa, synthetic construct
NPGRGDLLLS

SEQ ID NO: 120661 - protein, 10 aa, synthetic construct
NPARGDLLLS

SEQ ID NO: 120662 - protein, 10 aa, synthetic construct
NPVRGDLLLS

SEQ ID NO: 120663 - protein, 10 aa, synthetic construct
NPPRGDLLLS

SEQ ID NO: 120664 - protein, 10 aa, synthetic construct
NPLRGDLLLS

SEQ ID NO: 120665 - protein, 10 aa, synthetic construct
NPIRGDLLLS

SEQ ID NO: 120666 - protein, 10 aa, synthetic construct
NPMRGDLLLS

SEQ ID NO: 120667 - protein, 10 aa, synthetic construct
NPWRGDLLLS

SEQ ID NO: 120668 - protein, 10 aa, synthetic construct
NPFRGDLLLS

SEQ ID NO: 120669 - protein, 10 aa, synthetic construct
NPKRGDLLLS

SEQ ID NO: 120670 - protein, 10 aa, synthetic construct
NPRRGDLLLS

SEQ ID NO: 120671 - protein, 10 aa, synthetic construct
NPHRGDLLLS

SEQ ID NO: 120672 - protein, 10 aa, synthetic construct
NPSRGDLLLS

SEQ ID NO: 120673 - protein, 10 aa, synthetic construct
NPTRGDLLLS

SEQ ID NO: 120674 - protein, 10 aa, synthetic construct
NPYRGDLLLS

SEQ ID NO: 120675 - protein, 10 aa, synthetic construct
NPNRGDLLLS

SEQ ID NO: 120676 - protein, 10 aa, synthetic construct
NPQRGDLLLS

SEQ ID NO: 120677 - protein, 10 aa, synthetic construct
NPDRGDLLLS

SEQ ID NO: 120678 - protein, 10 aa, synthetic construct
NPERGDLLLS

SEQ ID NO: 120679 - protein, 10 aa, synthetic construct
NLGRGDLLLS

SEQ ID NO: 120680 - protein, 10 aa, synthetic construct
NLARGDLLLS

SEQ ID NO: 120681 - protein, 10 aa, synthetic construct
NLVRGDLLLS

SEQ ID NO: 120682 - protein, 10 aa, synthetic construct
NLPRGDLLLS

SEQ ID NO: 120683 - protein, 10 aa, synthetic construct
NLLRGDLLLS

SEQ ID NO: 120684 - protein, 10 aa, synthetic construct
NLIRGDLLLS

SEQ ID NO: 120685 - protein, 10 aa, synthetic construct
NLMRGDLLLS

SEQ ID NO: 120686 - protein, 10 aa, synthetic construct
NLWRGDLLLS

SEQ ID NO: 120687 - protein, 10 aa, synthetic construct
NLFRGDLLLS

SEQ ID NO: 120688 - protein, 10 aa, synthetic construct
NLKRGDLLLS

SEQ ID NO: 120689 - protein, 10 aa, synthetic construct
NLRRGDLLLS

SEQ ID NO: 120690 - protein, 10 aa, synthetic construct
NLHRGDLLLS

SEQ ID NO: 120691 - protein, 10 aa, synthetic construct
NLSRGDLLLS

SEQ ID NO: 120692 - protein, 10 aa, synthetic construct
NLTRGDLLLS

SEQ ID NO: 120693 - protein, 10 aa, synthetic construct
NLYRGDLLLS

SEQ ID NO: 120694 - protein, 10 aa, synthetic construct
NLNRGDLLLS

SEQ ID NO: 120695 - protein, 10 aa, synthetic construct
NLQRGDLLLS

SEQ ID NO: 120696 - protein, 10 aa, synthetic construct
NLDRGDLLLS

SEQ ID NO: 120697 - protein, 10 aa, synthetic construct
NLERGDLLLS

SEQ ID NO: 120698 - protein, 10 aa, synthetic construct
NIGRGDLLLS

SEQ ID NO: 120699 - protein, 10 aa, synthetic construct
NIARGDLLLS

SEQ ID NO: 120700 - protein, 10 aa, synthetic construct
NIVRGDLLLS

SEQ ID NO: 120701 - protein, 10 aa, synthetic construct
NIPRGDLLLS

SEQ ID NO: 120702 - protein, 10 aa, synthetic construct
NILRGDLLLS

SEQ ID NO: 120703 - protein, 10 aa, synthetic construct
NIIRGDLLLS

SEQ ID NO: 120704 - protein, 10 aa, synthetic construct
NIMRGDLLLS

SEQ ID NO: 120705 - protein, 10 aa, synthetic construct
NIWRGDLLLS

SEQ ID NO: 120706 - protein, 10 aa, synthetic construct
NIFRGDLLLS

SEQ ID NO: 120707 - protein, 10 aa, synthetic construct
NIKRGDLLLS

SEQ ID NO: 120708 - protein, 10 aa, synthetic construct
NIRRGDLLLS

SEQ ID NO: 120709 - protein, 10 aa, synthetic construct
NIHRGDLLLS

SEQ ID NO: 120710 - protein, 10 aa, synthetic construct
NISRGDLLLS

SEQ ID NO: 120711 - protein, 10 aa, synthetic construct
NITRGDLLLS

SEQ ID NO: 120712 - protein, 10 aa, synthetic construct
NIYRGDLLLS

SEQ ID NO: 120713 - protein, 10 aa, synthetic construct
NINRGDLLLS

SEQ ID NO: 120714 - protein, 10 aa, synthetic construct
NIQRGDLLLS

SEQ ID NO: 120715 - protein, 10 aa, synthetic construct
NIDRGDLLLS

SEQ ID NO: 120716 - protein, 10 aa, synthetic construct
NIERGDLLLS

SEQ ID NO: 120717 - protein, 10 aa, synthetic construct
NMGRGDLLLS

SEQ ID NO: 120718 - protein, 10 aa, synthetic construct
NMARGDLLLS

SEQ ID NO: 120719 - protein, 10 aa, synthetic construct
NMVRGDLLLS

SEQ ID NO: 120720 - protein, 10 aa, synthetic construct
NMPRGDLLLS

SEQ ID NO: 120721 - protein, 10 aa, synthetic construct
NMLRGDLLLS

SEQ ID NO: 120722 - protein, 10 aa, synthetic construct
NMIRGDLLLS

SEQ ID NO: 120723 - protein, 10 aa, synthetic construct
NMMRGDLLLS

SEQ ID NO: 120724 - protein, 10 aa, synthetic construct
NMWRGDLLLS

SEQ ID NO: 120725 - protein, 10 aa, synthetic construct
NMFRGDLLLS

SEQ ID NO: 120726 - protein, 10 aa, synthetic construct
NMKRGDLLLS

SEQ ID NO: 120727 - protein, 10 aa, synthetic construct
NMRRGDLLLS

SEQ ID NO: 120728 - protein, 10 aa, synthetic construct
NMHRGDLLLS

SEQ ID NO: 120729 - protein, 10 aa, synthetic construct
NMSRGDLLLS

SEQ ID NO: 120730 - protein, 10 aa, synthetic construct
NMTRGDLLLS

SEQ ID NO: 120731 - protein, 10 aa, synthetic construct
NMYRGDLLLS

SEQ ID NO: 120732 - protein, 10 aa, synthetic construct
NMNRGDLLLS

SEQ ID NO: 120733 - protein, 10 aa, synthetic construct
NMQRGDLLLS

SEQ ID NO: 120734 - protein, 10 aa, synthetic construct
NMDRGDLLLS

SEQ ID NO: 120735 - protein, 10 aa, synthetic construct
NMERGDLLLS

SEQ ID NO: 120736 - protein, 10 aa, synthetic construct
NWGRGDLLLS

SEQ ID NO: 120737 - protein, 10 aa, synthetic construct
NWARGDLLLS

SEQ ID NO: 120738 - protein, 10 aa, synthetic construct
NWVRGDLLLS

SEQ ID NO: 120739 - protein, 10 aa, synthetic construct
NWPRGDLLLS

SEQ ID NO: 120740 - protein, 10 aa, synthetic construct
NWLRGDLLLS

SEQ ID NO: 120741 - protein, 10 aa, synthetic construct
NWIRGDLLLS

SEQ ID NO: 120742 - protein, 10 aa, synthetic construct
NWMRGDLLLS

SEQ ID NO: 120743 - protein, 10 aa, synthetic construct
NWWRGDLLLS

SEQ ID NO: 120744 - protein, 10 aa, synthetic construct
NWFRGDLLLS

SEQ ID NO: 120745 - protein, 10 aa, synthetic construct
NWKRGDLLLS

SEQ ID NO: 120746 - protein, 10 aa, synthetic construct
NWRRGDLLLS

SEQ ID NO: 120747 - protein, 10 aa, synthetic construct
NWHRGDLLLS

SEQ ID NO: 120748 - protein, 10 aa, synthetic construct
NWSRGDLLLS

SEQ ID NO: 120749 - protein, 10 aa, synthetic construct
NWTRGDLLLS

SEQ ID NO: 120750 - protein, 10 aa, synthetic construct
NWYRGDLLLS

SEQ ID NO: 120751 - protein, 10 aa, synthetic construct
NWNRGDLLLS

SEQ ID NO: 120752 - protein, 10 aa, synthetic construct
NWQRGDLLLS

SEQ ID NO: 120753 - protein, 10 aa, synthetic construct
NWDRGDLLLS

SEQ ID NO: 120754 - protein, 10 aa, synthetic construct
NWERGDLLLS

SEQ ID NO: 120755 - protein, 10 aa, synthetic construct
NFGRGDLLLS

SEQ ID NO: 120756 - protein, 10 aa, synthetic construct
NFARGDLLLS

SEQ ID NO: 120757 - protein, 10 aa, synthetic construct
NFVRGDLLLS

SEQ ID NO: 120758 - protein, 10 aa, synthetic construct
NFPRGDLLLS

SEQ ID NO: 120759 - protein, 10 aa, synthetic construct
NFLRGDLLLS

SEQ ID NO: 120760 - protein, 10 aa, synthetic construct
NFIRGDLLLS

SEQ ID NO: 120761 - protein, 10 aa, synthetic construct
NFMRGDLLLS

SEQ ID NO: 120762 - protein, 10 aa, synthetic construct
NFWRGDLLLS

SEQ ID NO: 120763 - protein, 10 aa, synthetic construct
NFFRGDLLLS

SEQ ID NO: 120764 - protein, 10 aa, synthetic construct
NFKRGDLLLS

SEQ ID NO: 120765 - protein, 10 aa, synthetic construct
NFRRGDLLLS

SEQ ID NO: 120766 - protein, 10 aa, synthetic construct
NFHRGDLLLS

SEQ ID NO: 120767 - protein, 10 aa, synthetic construct
NFSRGDLLLS

SEQ ID NO: 120768 - protein, 10 aa, synthetic construct
NFTRGDLLLS

SEQ ID NO: 120769 - protein, 10 aa, synthetic construct
NFYRGDLLLS

SEQ ID NO: 120770 - protein, 10 aa, synthetic construct
NFNRGDLLLS

SEQ ID NO: 120771 - protein, 10 aa, synthetic construct
NFQRGDLLLS

SEQ ID NO: 120772 - protein, 10 aa, synthetic construct
NFDRGDLLLS

SEQ ID NO: 120773 - protein, 10 aa, synthetic construct
NFERGDLLLS

SEQ ID NO: 120774 - protein, 10 aa, synthetic construct
NKGRGDLLLS

SEQ ID NO: 120775 - protein, 10 aa, synthetic construct
NKARGDLLLS

SEQ ID NO: 120776 - protein, 10 aa, synthetic construct
NKVRGDLLLS

SEQ ID NO: 120777 - protein, 10 aa, synthetic construct
NKPRGDLLLS

SEQ ID NO: 120778 - protein, 10 aa, synthetic construct
NKLRGDLLLS

SEQ ID NO: 120779 - protein, 10 aa, synthetic construct
NKIRGDLLLS

SEQ ID NO: 120780 - protein, 10 aa, synthetic construct
NKMRGDLLLS

SEQ ID NO: 120781 - protein, 10 aa, synthetic construct
NKWRGDLLLS

SEQ ID NO: 120782 - protein, 10 aa, synthetic construct
NKFRGDLLLS

SEQ ID NO: 120783 - protein, 10 aa, synthetic construct
NKKRGDLLLS

SEQ ID NO: 120784 - protein, 10 aa, synthetic construct
NKRRGDLLLS

SEQ ID NO: 120785 - protein, 10 aa, synthetic construct
NKHRGDLLLS

SEQ ID NO: 120786 - protein, 10 aa, synthetic construct
NKSRGDLLLS

SEQ ID NO: 120787 - protein, 10 aa, synthetic construct
NKTRGDLLLS

SEQ ID NO: 120788 - protein, 10 aa, synthetic construct
NKYRGDLLLS

SEQ ID NO: 120789 - protein, 10 aa, synthetic construct
NKNRGDLLLS

SEQ ID NO: 120790 - protein, 10 aa, synthetic construct
NKQRGDLLLS

SEQ ID NO: 120791 - protein, 10 aa, synthetic construct
NKDRGDLLLS

SEQ ID NO: 120792 - protein, 10 aa, synthetic construct
NKERGDLLLS

SEQ ID NO: 120793 - protein, 10 aa, synthetic construct
NRGRGDLLLS

SEQ ID NO: 120794 - protein, 10 aa, synthetic construct
NRARGDLLLS

SEQ ID NO: 120795 - protein, 10 aa, synthetic construct
NRVRGDLLLS

SEQ ID NO: 120796 - protein, 10 aa, synthetic construct
NRPRGDLLLS

SEQ ID NO: 120797 - protein, 10 aa, synthetic construct
NRLRGDLLLS

SEQ ID NO: 120798 - protein, 10 aa, synthetic construct
NRIRGDLLLS

SEQ ID NO: 120799 - protein, 10 aa, synthetic construct
NRMRGDLLLS

SEQ ID NO: 120800 - protein, 10 aa, synthetic construct
NRWRGDLLLS

SEQ ID NO: 120801 - protein, 10 aa, synthetic construct
NRFRGDLLLS

SEQ ID NO: 120802 - protein, 10 aa, synthetic construct
NRKRGDLLLS

SEQ ID NO: 120803 - protein, 10 aa, synthetic construct
NRRRGDLLLS

SEQ ID NO: 120804 - protein, 10 aa, synthetic construct
NRHRGDLLLS

SEQ ID NO: 120805 - protein, 10 aa, synthetic construct
NRSRGDLLLS

SEQ ID NO: 120806 - protein, 10 aa, synthetic construct
NRTRGDLLLS

SEQ ID NO: 120807 - protein, 10 aa, synthetic construct
NRYRGDLLLS

SEQ ID NO: 120808 - protein, 10 aa, synthetic construct
NRNRGDLLLS

SEQ ID NO: 120809 - protein, 10 aa, synthetic construct
NRQRGDLLLS

SEQ ID NO: 120810 - protein, 10 aa, synthetic construct
NRDRGDLLLS

SEQ ID NO: 120811 - protein, 10 aa, synthetic construct
NRERGDLLLS

SEQ ID NO: 120812 - protein, 10 aa, synthetic construct
NHGRGDLLLS

SEQ ID NO: 120813 - protein, 10 aa, synthetic construct
NHARGDLLLS

SEQ ID NO: 120814 - protein, 10 aa, synthetic construct
NHVRGDLLLS

SEQ ID NO: 120815 - protein, 10 aa, synthetic construct
NHPRGDLLLS

SEQ ID NO: 120816 - protein, 10 aa, synthetic construct
NHLRGDLLLS

SEQ ID NO: 120817 - protein, 10 aa, synthetic construct
NHIRGDLLLS

SEQ ID NO: 120818 - protein, 10 aa, synthetic construct
NHMRGDLLLS

SEQ ID NO: 120819 - protein, 10 aa, synthetic construct
NHWRGDLLLS

SEQ ID NO: 120820 - protein, 10 aa, synthetic construct
NHFRGDLLLS

SEQ ID NO: 120821 - protein, 10 aa, synthetic construct
NHKRGDLLLS

SEQ ID NO: 120822 - protein, 10 aa, synthetic construct
NHRRGDLLLS

SEQ ID NO: 120823 - protein, 10 aa, synthetic construct
NHHRGDLLLS

SEQ ID NO: 120824 - protein, 10 aa, synthetic construct
NHSRGDLLLS

SEQ ID NO: 120825 - protein, 10 aa, synthetic construct
NHTRGDLLLS

SEQ ID NO: 120826 - protein, 10 aa, synthetic construct
NHYRGDLLLS

SEQ ID NO: 120827 - protein, 10 aa, synthetic construct
NHNRGDLLLS

SEQ ID NO: 120828 - protein, 10 aa, synthetic construct
NHQRGDLLLS

SEQ ID NO: 120829 - protein, 10 aa, synthetic construct
NHDRGDLLLS

SEQ ID NO: 120830 - protein, 10 aa, synthetic construct
NHERGDLLLS

SEQ ID NO: 120831 - protein, 10 aa, synthetic construct
NSGRGDLLLS

SEQ ID NO: 120832 - protein, 10 aa, synthetic construct
NSARGDLLLS

SEQ ID NO: 120833 - protein, 10 aa, synthetic construct
NSVRGDLLLS

SEQ ID NO: 120834 - protein, 10 aa, synthetic construct
NSPRGDLLLS

SEQ ID NO: 120835 - protein, 10 aa, synthetic construct
NSLRGDLLLS

SEQ ID NO: 120836 - protein, 10 aa, synthetic construct
NSIRGDLLLS

SEQ ID NO: 120837 - protein, 10 aa, synthetic construct
NSMRGDLLLS

SEQ ID NO: 120838 - protein, 10 aa, synthetic construct
NSWRGDLLLS

SEQ ID NO: 120839 - protein, 10 aa, synthetic construct
NSFRGDLLLS

SEQ ID NO: 120840 - protein, 10 aa, synthetic construct
NSKRGDLLLS

SEQ ID NO: 120841 - protein, 10 aa, synthetic construct
NSRRGDLLLS

SEQ ID NO: 120842 - protein, 10 aa, synthetic construct
NSHRGDLLLS

SEQ ID NO: 120843 - protein, 10 aa, synthetic construct
NSSRGDLLLS

SEQ ID NO: 120844 - protein, 10 aa, synthetic construct
NSTRGDLLLS

SEQ ID NO: 120845 - protein, 10 aa, synthetic construct
NSYRGDLLLS

SEQ ID NO: 120846 - protein, 10 aa, synthetic construct
NSNRGDLLLS

SEQ ID NO: 120847 - protein, 10 aa, synthetic construct
NSQRGDLLLS

SEQ ID NO: 120848 - protein, 10 aa, synthetic construct
NSDRGDLLLS

SEQ ID NO: 120849 - protein, 10 aa, synthetic construct
NSERGDLLLS

SEQ ID NO: 120850 - protein, 10 aa, synthetic construct
NTGRGDLLLS

SEQ ID NO: 120851 - protein, 10 aa, synthetic construct
NTARGDLLLS

SEQ ID NO: 120852 - protein, 10 aa, synthetic construct
NTVRGDLLLS

SEQ ID NO: 120853 - protein, 10 aa, synthetic construct
NTPRGDLLLS

SEQ ID NO: 120854 - protein, 10 aa, synthetic construct
NTLRGDLLLS

SEQ ID NO: 120855 - protein, 10 aa, synthetic construct
NTIRGDLLLS

SEQ ID NO: 120856 - protein, 10 aa, synthetic construct
NTMRGDLLLS

SEQ ID NO: 120857 - protein, 10 aa, synthetic construct
NTWRGDLLLS

SEQ ID NO: 120858 - protein, 10 aa, synthetic construct
NTFRGDLLLS

SEQ ID NO: 120859 - protein, 10 aa, synthetic construct
NTKRGDLLLS

SEQ ID NO: 120860 - protein, 10 aa, synthetic construct
NTRRGDLLLS

SEQ ID NO: 120861 - protein, 10 aa, synthetic construct
NTHRGDLLLS

SEQ ID NO: 120862 - protein, 10 aa, synthetic construct
NTSRGDLLLS

SEQ ID NO: 120863 - protein, 10 aa, synthetic construct
NTTRGDLLLS

SEQ ID NO: 120864 - protein, 10 aa, synthetic construct
NTYRGDLLLS

SEQ ID NO: 120865 - protein, 10 aa, synthetic construct
NTNRGDLLLS

SEQ ID NO: 120866 - protein, 10 aa, synthetic construct
NTQRGDLLLS

SEQ ID NO: 120867 - protein, 10 aa, synthetic construct
NTDRGDLLLS

SEQ ID NO: 120868 - protein, 10 aa, synthetic construct
NTERGDLLLS

SEQ ID NO: 120869 - protein, 10 aa, synthetic construct
NYGRGDLLLS

SEQ ID NO: 120870 - protein, 10 aa, synthetic construct
NYARGDLLLS

SEQ ID NO: 120871 - protein, 10 aa, synthetic construct
NYVRGDLLLS

SEQ ID NO: 120872 - protein, 10 aa, synthetic construct
NYPRGDLLLS

SEQ ID NO: 120873 - protein, 10 aa, synthetic construct
NYLRGDLLLS

SEQ ID NO: 120874 - protein, 10 aa, synthetic construct
NYIRGDLLLS

SEQ ID NO: 120875 - protein, 10 aa, synthetic construct
NYMRGDLLLS

SEQ ID NO: 120876 - protein, 10 aa, synthetic construct
NYWRGDLLLS

SEQ ID NO: 120877 - protein, 10 aa, synthetic construct
NYFRGDLLLS

SEQ ID NO: 120878 - protein, 10 aa, synthetic construct
NYKRGDLLLS

SEQ ID NO: 120879 - protein, 10 aa, synthetic construct
NYRRGDLLLS

SEQ ID NO: 120880 - protein, 10 aa, synthetic construct
NYHRGDLLLS

SEQ ID NO: 120881 - protein, 10 aa, synthetic construct
NYSRGDLLLS

SEQ ID NO: 120882 - protein, 10 aa, synthetic construct
NYTRGDLLLS

SEQ ID NO: 120883 - protein, 10 aa, synthetic construct
NYYRGDLLLS

SEQ ID NO: 120884 - protein, 10 aa, synthetic construct
NYNRGDLLLS

SEQ ID NO: 120885 - protein, 10 aa, synthetic construct
NYQRGDLLLS

SEQ ID NO: 120886 - protein, 10 aa, synthetic construct
NYDRGDLLLS

SEQ ID NO: 120887 - protein, 10 aa, synthetic construct
NYERGDLLLS

SEQ ID NO: 120888 - protein, 10 aa, synthetic construct
NNGRGDLLLS

SEQ ID NO: 120889 - protein, 10 aa, synthetic construct
NNARGDLLLS

SEQ ID NO: 120890 - protein, 10 aa, synthetic construct
NNVRGDLLLS

SEQ ID NO: 120891 - protein, 10 aa, synthetic construct
NNPRGDLLLS

SEQ ID NO: 120892 - protein, 10 aa, synthetic construct
NNLRGDLLLS

SEQ ID NO: 120893 - protein, 10 aa, synthetic construct
NNIRGDLLLS

SEQ ID NO: 120894 - protein, 10 aa, synthetic construct
NNMRGDLLLS

SEQ ID NO: 120895 - protein, 10 aa, synthetic construct
NNWRGDLLLS

SEQ ID NO: 120896 - protein, 10 aa, synthetic construct
NNFRGDLLLS

SEQ ID NO: 120897 - protein, 10 aa, synthetic construct
NNKRGDLLLS

SEQ ID NO: 120898 - protein, 10 aa, synthetic construct
NNRRGDLLLS

SEQ ID NO: 120899 - protein, 10 aa, synthetic construct
NNHRGDLLLS

SEQ ID NO: 120900 - protein, 10 aa, synthetic construct
NNSRGDLLLS

SEQ ID NO: 120901 - protein, 10 aa, synthetic construct
NNTRGDLLLS

SEQ ID NO: 120902 - protein, 10 aa, synthetic construct
NNYRGDLLLS

SEQ ID NO: 120903 - protein, 10 aa, synthetic construct
NNNRGDLLLS

SEQ ID NO: 120904 - protein, 10 aa, synthetic construct
NNQRGDLLLS

SEQ ID NO: 120905 - protein, 10 aa, synthetic construct
NNDRGDLLLS

SEQ ID NO: 120906 - protein, 10 aa, synthetic construct
NNERGDLLLS

SEQ ID NO: 120907 - protein, 10 aa, synthetic construct
NQGRGDLLLS

SEQ ID NO: 120908 - protein, 10 aa, synthetic construct
NQARGDLLLS

SEQ ID NO: 120909 - protein, 10 aa, synthetic construct
NQVRGDLLLS

SEQ ID NO: 120910 - protein, 10 aa, synthetic construct
NQPRGDLLLS

SEQ ID NO: 120911 - protein, 10 aa, synthetic construct
NQLRGDLLLS

SEQ ID NO: 120912 - protein, 10 aa, synthetic construct
NQIRGDLLLS

SEQ ID NO: 120913 - protein, 10 aa, synthetic construct
NQMRGDLLLS

SEQ ID NO: 120914 - protein, 10 aa, synthetic construct
NQWRGDLLLS

SEQ ID NO: 120915 - protein, 10 aa, synthetic construct
NQFRGDLLLS

SEQ ID NO: 120916 - protein, 10 aa, synthetic construct
NQKRGDLLLS

SEQ ID NO: 120917 - protein, 10 aa, synthetic construct
NQRRGDLLLS

SEQ ID NO: 120918 - protein, 10 aa, synthetic construct
NQHRGDLLLS

SEQ ID NO: 120919 - protein, 10 aa, synthetic construct
NQSRGDLLLS

SEQ ID NO: 120920 - protein, 10 aa, synthetic construct
NQTRGDLLLS

SEQ ID NO: 120921 - protein, 10 aa, synthetic construct
NQYRGDLLLS

SEQ ID NO: 120922 - protein, 10 aa, synthetic construct
NQNRGDLLLS

SEQ ID NO: 120923 - protein, 10 aa, synthetic construct
NQQRGDLLLS

SEQ ID NO: 120924 - protein, 10 aa, synthetic construct
NQDRGDLLLS

SEQ ID NO: 120925 - protein, 10 aa, synthetic construct
NQERGDLLLS

SEQ ID NO: 120926 - protein, 10 aa, synthetic construct
NDGRGDLLLS

SEQ ID NO: 120927 - protein, 10 aa, synthetic construct
NDARGDLLLS

SEQ ID NO: 120928 - protein, 10 aa, synthetic construct
NDVRGDLLLS

SEQ ID NO: 120929 - protein, 10 aa, synthetic construct
NDPRGDLLLS

SEQ ID NO: 120930 - protein, 10 aa, synthetic construct
NDLRGDLLLS

SEQ ID NO: 120931 - protein, 10 aa, synthetic construct
NDIRGDLLLS

SEQ ID NO: 120932 - protein, 10 aa, synthetic construct
NDMRGDLLLS

SEQ ID NO: 120933 - protein, 10 aa, synthetic construct
NDWRGDLLLS

SEQ ID NO: 120934 - protein, 10 aa, synthetic construct
NDFRGDLLLS

SEQ ID NO: 120935 - protein, 10 aa, synthetic construct
NDKRGDLLLS

SEQ ID NO: 120936 - protein, 10 aa, synthetic construct
NDRRGDLLLS

SEQ ID NO: 120937 - protein, 10 aa, synthetic construct
NDHRGDLLLS

SEQ ID NO: 120938 - protein, 10 aa, synthetic construct
NDSRGDLLLS

SEQ ID NO: 120939 - protein, 10 aa, synthetic construct
NDTRGDLLLS

SEQ ID NO: 120940 - protein, 10 aa, synthetic construct
NDYRGDLLLS

SEQ ID NO: 120941 - protein, 10 aa, synthetic construct
NDNRGDLLLS

SEQ ID NO: 120942 - protein, 10 aa, synthetic construct
NDQRGDLLLS

SEQ ID NO: 120943 - protein, 10 aa, synthetic construct
NDDRGDLLLS

SEQ ID NO: 120944 - protein, 10 aa, synthetic construct
NDERGDLLLS

SEQ ID NO: 120945 - protein, 10 aa, synthetic construct
NEGRGDLLLS

SEQ ID NO: 120946 - protein, 10 aa, synthetic construct
NEARGDLLLS

SEQ ID NO: 120947 - protein, 10 aa, synthetic construct
NEVRGDLLLS

SEQ ID NO: 120948 - protein, 10 aa, synthetic construct
NEPRGDLLLS

SEQ ID NO: 120949 - protein, 10 aa, synthetic construct
NELRGDLLLS

SEQ ID NO: 120950 - protein, 10 aa, synthetic construct
NEIRGDLLLS

SEQ ID NO: 120951 - protein, 10 aa, synthetic construct
NEMRGDLLLS

SEQ ID NO: 120952 - protein, 10 aa, synthetic construct
NEWRGDLLLS

SEQ ID NO: 120953 - protein, 10 aa, synthetic construct
NEFRGDLLLS

SEQ ID NO: 120954 - protein, 10 aa, synthetic construct
NEKRGDLLLS

SEQ ID NO: 120955 - protein, 10 aa, synthetic construct
NERRGDLLLS

SEQ ID NO: 120956 - protein, 10 aa, synthetic construct
NEHRGDLLLS

SEQ ID NO: 120957 - protein, 10 aa, synthetic construct
NESRGDLLLS

SEQ ID NO: 120958 - protein, 10 aa, synthetic construct
NETRGDLLLS

SEQ ID NO: 120959 - protein, 10 aa, synthetic construct
NEYRGDLLLS

SEQ ID NO: 120960 - protein, 10 aa, synthetic construct
NENRGDLLLS

SEQ ID NO: 120961 - protein, 10 aa, synthetic construct
NEQRGDLLLS

SEQ ID NO: 120962 - protein, 10 aa, synthetic construct
NEDRGDLLLS

SEQ ID NO: 120963 - protein, 10 aa, synthetic construct
NEERGDLLLS

SEQ ID NO: 120964 - protein, 10 aa, synthetic construct
DGGRGDLLLS

SEQ ID NO: 120965 - protein, 10 aa, synthetic construct
DGARGDLLLS

SEQ ID NO: 120966 - protein, 10 aa, synthetic construct
DGVRGDLLLS

SEQ ID NO: 120967 - protein, 10 aa, synthetic construct
DGPRGDLLLS

SEQ ID NO: 120968 - protein, 10 aa, synthetic construct
DGLRGDLLLS

SEQ ID NO: 120969 - protein, 10 aa, synthetic construct
DGIRGDLLLS

SEQ ID NO: 120970 - protein, 10 aa, synthetic construct
DGMRGDLLLS

SEQ ID NO: 120971 - protein, 10 aa, synthetic construct
DGWRGDLLLS

SEQ ID NO: 120972 - protein, 10 aa, synthetic construct
DGFRGDLLLS

SEQ ID NO: 120973 - protein, 10 aa, synthetic construct
DGKRGDLLLS

SEQ ID NO: 120974 - protein, 10 aa, synthetic construct
DGRRGDLLLS

SEQ ID NO: 120975 - protein, 10 aa, synthetic construct
DGHRGDLLLS

SEQ ID NO: 120976 - protein, 10 aa, synthetic construct
DGSRGDLLLS

SEQ ID NO: 120977 - protein, 10 aa, synthetic construct
DGTRGDLLLS

SEQ ID NO: 120978 - protein, 10 aa, synthetic construct
DGYRGDLLLS

SEQ ID NO: 120979 - protein, 10 aa, synthetic construct
DGNRGDLLLS

SEQ ID NO: 120980 - protein, 10 aa, synthetic construct
DGQRGDLLLS

SEQ ID NO: 120981 - protein, 10 aa, synthetic construct
DGDRGDLLLS

SEQ ID NO: 120982 - protein, 10 aa, synthetic construct
DGERGDLLLS

SEQ ID NO: 120983 - protein, 10 aa, synthetic construct
DAGRGDLLLS

SEQ ID NO: 120984 - protein, 10 aa, synthetic construct
DAARGDLLLS

SEQ ID NO: 120985 - protein, 10 aa, synthetic construct
DAVRGDLLLS

SEQ ID NO: 120986 - protein, 10 aa, synthetic construct
DAPRGDLLLS

SEQ ID NO: 120987 - protein, 10 aa, synthetic construct
DALRGDLLLS

SEQ ID NO: 120988 - protein, 10 aa, synthetic construct
DAIRGDLLLS

SEQ ID NO: 120989 - protein, 10 aa, synthetic construct
DAMRGDLLLS

SEQ ID NO: 120990 - protein, 10 aa, synthetic construct
DAWRGDLLLS

SEQ ID NO: 120991 - protein, 10 aa, synthetic construct
DAFRGDLLLS

SEQ ID NO: 120992 - protein, 10 aa, synthetic construct
DAKRGDLLLS

SEQ ID NO: 120993 - protein, 10 aa, synthetic construct
DARRGDLLLS

SEQ ID NO: 120994 - protein, 10 aa, synthetic construct
DAHRGDLLLS

SEQ ID NO: 120995 - protein, 10 aa, synthetic construct
DASRGDLLLS

SEQ ID NO: 120996 - protein, 10 aa, synthetic construct
DATRGDLLLS

SEQ ID NO: 120997 - protein, 10 aa, synthetic construct
DAYRGDLLLS

SEQ ID NO: 120998 - protein, 10 aa, synthetic construct
DANRGDLLLS

SEQ ID NO: 120999 - protein, 10 aa, synthetic construct
DAQRGDLLLS

SEQ ID NO: 121000 - protein, 10 aa, synthetic construct
DADRGDLLLS

SEQ ID NO: 121001 - protein, 10 aa, synthetic construct
DAERGDLLLS

SEQ ID NO: 121002 - protein, 10 aa, synthetic construct
DVGRGDLLLS

SEQ ID NO: 121003 - protein, 10 aa, synthetic construct
DVARGDLLLS

SEQ ID NO: 121004 - protein, 10 aa, synthetic construct
DVVRGDLLLS

SEQ ID NO: 121005 - protein, 10 aa, synthetic construct
DVPRGDLLLS

SEQ ID NO: 121006 - protein, 10 aa, synthetic construct
DVLRGDLLLS

SEQ ID NO: 121007 - protein, 10 aa, synthetic construct
DVIRGDLLLS

SEQ ID NO: 121008 - protein, 10 aa, synthetic construct
DVMRGDLLLS

SEQ ID NO: 121009 - protein, 10 aa, synthetic construct
DVWRGDLLLS

SEQ ID NO: 121010 - protein, 10 aa, synthetic construct
DVFRGDLLLS

SEQ ID NO: 121011 - protein, 10 aa, synthetic construct
DVKRGDLLLS

SEQ ID NO: 121012 - protein, 10 aa, synthetic construct
DVRRGDLLLS

SEQ ID NO: 121013 - protein, 10 aa, synthetic construct
DVHRGDLLLS

SEQ ID NO: 121014 - protein, 10 aa, synthetic construct
DVSRGDLLLS

SEQ ID NO: 121015 - protein, 10 aa, synthetic construct
DVTRGDLLLS

SEQ ID NO: 121016 - protein, 10 aa, synthetic construct
DVYRGDLLLS

SEQ ID NO: 121017 - protein, 10 aa, synthetic construct
DVNRGDLLLS

SEQ ID NO: 121018 - protein, 10 aa, synthetic construct
DVQRGDLLLS

SEQ ID NO: 121019 - protein, 10 aa, synthetic construct
DVDRGDLLLS

SEQ ID NO: 121020 - protein, 10 aa, synthetic construct
DVERGDLLLS

SEQ ID NO: 121021 - protein, 10 aa, synthetic construct
DPGRGDLLLS

SEQ ID NO: 121022 - protein, 10 aa, synthetic construct
DPARGDLLLS

SEQ ID NO: 121023 - protein, 10 aa, synthetic construct
DPVRGDLLLS

SEQ ID NO: 121024 - protein, 10 aa, synthetic construct
DPPRGDLLLS

SEQ ID NO: 121025 - protein, 10 aa, synthetic construct
DPLRGDLLLS

SEQ ID NO: 121026 - protein, 10 aa, synthetic construct
DPIRGDLLLS

SEQ ID NO: 121027 - protein, 10 aa, synthetic construct
DPMRGDLLLS

SEQ ID NO: 121028 - protein, 10 aa, synthetic construct
DPWRGDLLLS

SEQ ID NO: 121029 - protein, 10 aa, synthetic construct
DPFRGDLLLS

SEQ ID NO: 121030 - protein, 10 aa, synthetic construct
DPKRGDLLLS

SEQ ID NO: 121031 - protein, 10 aa, synthetic construct
DPRRGDLLLS

SEQ ID NO: 121032 - protein, 10 aa, synthetic construct
DPHRGDLLLS

SEQ ID NO: 121033 - protein, 10 aa, synthetic construct
DPSRGDLLLS

SEQ ID NO: 121034 - protein, 10 aa, synthetic construct
DPTRGDLLLS

SEQ ID NO: 121035 - protein, 10 aa, synthetic construct
DPYRGDLLLS

SEQ ID NO: 121036 - protein, 10 aa, synthetic construct
DPNRGDLLLS

SEQ ID NO: 121037 - protein, 10 aa, synthetic construct
DPQRGDLLLS

SEQ ID NO: 121038 - protein, 10 aa, synthetic construct
DPDRGDLLLS

SEQ ID NO: 121039 - protein, 10 aa, synthetic construct
DPERGDLLLS

SEQ ID NO: 121040 - protein, 10 aa, synthetic construct
DLGRGDLLLS

SEQ ID NO: 121041 - protein, 10 aa, synthetic construct
DLARGDLLLS

SEQ ID NO: 121042 - protein, 10 aa, synthetic construct
DLVRGDLLLS

SEQ ID NO: 121043 - protein, 10 aa, synthetic construct
DLPRGDLLLS

SEQ ID NO: 121044 - protein, 10 aa, synthetic construct
DLLRGDLLLS

SEQ ID NO: 121045 - protein, 10 aa, synthetic construct
DLIRGDLLLS

SEQ ID NO: 121046 - protein, 10 aa, synthetic construct
DLMRGDLLLS

SEQ ID NO: 121047 - protein, 10 aa, synthetic construct
DLWRGDLLLS

SEQ ID NO: 121048 - protein, 10 aa, synthetic construct
DLFRGDLLLS

SEQ ID NO: 121049 - protein, 10 aa, synthetic construct
DLKRGDLLLS

SEQ ID NO: 121050 - protein, 10 aa, synthetic construct
DLRRGDLLLS

SEQ ID NO: 121051 - protein, 10 aa, synthetic construct
DLHRGDLLLS

SEQ ID NO: 121052 - protein, 10 aa, synthetic construct
DLSRGDLLLS

SEQ ID NO: 121053 - protein, 10 aa, synthetic construct
DLTRGDLLLS

SEQ ID NO: 121054 - protein, 10 aa, synthetic construct
DLYRGDLLLS

SEQ ID NO: 121055 - protein, 10 aa, synthetic construct
DLNRGDLLLS

SEQ ID NO: 121056 - protein, 10 aa, synthetic construct
DLQRGDLLLS

SEQ ID NO: 121057 - protein, 10 aa, synthetic construct
DLDRGDLLLS

SEQ ID NO: 121058 - protein, 10 aa, synthetic construct
DLERGDLLLS

SEQ ID NO: 121059 - protein, 10 aa, synthetic construct
DIGRGDLLLS

SEQ ID NO: 121060 - protein, 10 aa, synthetic construct
DIARGDLLLS

SEQ ID NO: 121061 - protein, 10 aa, synthetic construct
DIVRGDLLLS

SEQ ID NO: 121062 - protein, 10 aa, synthetic construct
DIPRGDLLLS

SEQ ID NO: 121063 - protein, 10 aa, synthetic construct
DILRGDLLLS

SEQ ID NO: 121064 - protein, 10 aa, synthetic construct
DIIRGDLLLS

SEQ ID NO: 121065 - protein, 10 aa, synthetic construct
DIMRGDLLLS

SEQ ID NO: 121066 - protein, 10 aa, synthetic construct
DIWRGDLLLS

SEQ ID NO: 121067 - protein, 10 aa, synthetic construct
DIFRGDLLLS

SEQ ID NO: 121068 - protein, 10 aa, synthetic construct
DIKRGDLLLS

SEQ ID NO: 121069 - protein, 10 aa, synthetic construct
DIRRGDLLLS

SEQ ID NO: 121070 - protein, 10 aa, synthetic construct
DIHRGDLLLS

SEQ ID NO: 121071 - protein, 10 aa, synthetic construct
DISRGDLLLS

SEQ ID NO: 121072 - protein, 10 aa, synthetic construct
DITRGDLLLS

SEQ ID NO: 121073 - protein, 10 aa, synthetic construct
DIYRGDLLLS

SEQ ID NO: 121074 - protein, 10 aa, synthetic construct
DINRGDLLLS

SEQ ID NO: 121075 - protein, 10 aa, synthetic construct
DIQRGDLLLS

SEQ ID NO: 121076 - protein, 10 aa, synthetic construct
DIDRGDLLLS

SEQ ID NO: 121077 - protein, 10 aa, synthetic construct
DIERGDLLLS

SEQ ID NO: 121078 - protein, 10 aa, synthetic construct
DMGRGDLLLS

SEQ ID NO: 121079 - protein, 10 aa, synthetic construct
DMARGDLLLS

SEQ ID NO: 121080 - protein, 10 aa, synthetic construct
DMVRGDLLLS

SEQ ID NO: 121081 - protein, 10 aa, synthetic construct
DMPRGDLLLS

SEQ ID NO: 121082 - protein, 10 aa, synthetic construct
DMLRGDLLLS

SEQ ID NO: 121083 - protein, 10 aa, synthetic construct
DMIRGDLLLS

SEQ ID NO: 121084 - protein, 10 aa, synthetic construct
DMMRGDLLLS

SEQ ID NO: 121085 - protein, 10 aa, synthetic construct
DMWRGDLLLS

SEQ ID NO: 121086 - protein, 10 aa, synthetic construct
DMFRGDLLLS

SEQ ID NO: 121087 - protein, 10 aa, synthetic construct
DMKRGDLLLS

SEQ ID NO: 121088 - protein, 10 aa, synthetic construct
DMRRGDLLLS

SEQ ID NO: 121089 - protein, 10 aa, synthetic construct
DMHRGDLLLS

SEQ ID NO: 121090 - protein, 10 aa, synthetic construct
DMSRGDLLLS

SEQ ID NO: 121091 - protein, 10 aa, synthetic construct
DMTRGDLLLS

SEQ ID NO: 121092 - protein, 10 aa, synthetic construct
DMYRGDLLLS

SEQ ID NO: 121093 - protein, 10 aa, synthetic construct
DMNRGDLLLS

SEQ ID NO: 121094 - protein, 10 aa, synthetic construct
DMQRGDLLLS

SEQ ID NO: 121095 - protein, 10 aa, synthetic construct
DMDRGDLLLS

SEQ ID NO: 121096 - protein, 10 aa, synthetic construct
DMERGDLLLS

SEQ ID NO: 121097 - protein, 10 aa, synthetic construct
DWGRGDLLLS

SEQ ID NO: 121098 - protein, 10 aa, synthetic construct
DWARGDLLLS

SEQ ID NO: 121099 - protein, 10 aa, synthetic construct
DWVRGDLLLS

SEQ ID NO: 121100 - protein, 10 aa, synthetic construct
DWPRGDLLLS

SEQ ID NO: 121101 - protein, 10 aa, synthetic construct
DWLRGDLLLS

SEQ ID NO: 121102 - protein, 10 aa, synthetic construct
DWIRGDLLLS

SEQ ID NO: 121103 - protein, 10 aa, synthetic construct
DWMRGDLLLS

SEQ ID NO: 121104 - protein, 10 aa, synthetic construct
DWWRGDLLLS

SEQ ID NO: 121105 - protein, 10 aa, synthetic construct
DWFRGDLLLS

SEQ ID NO: 121106 - protein, 10 aa, synthetic construct
DWKRGDLLLS

SEQ ID NO: 121107 - protein, 10 aa, synthetic construct
DWRRGDLLLS

SEQ ID NO: 121108 - protein, 10 aa, synthetic construct
DWHRGDLLLS

SEQ ID NO: 121109 - protein, 10 aa, synthetic construct
DWSRGDLLLS

SEQ ID NO: 121110 - protein, 10 aa, synthetic construct
DWTRGDLLLS

SEQ ID NO: 121111 - protein, 10 aa, synthetic construct
DWYRGDLLLS

SEQ ID NO: 121112 - protein, 10 aa, synthetic construct
DWNRGDLLLS

SEQ ID NO: 121113 - protein, 10 aa, synthetic construct
DWQRGDLLLS

SEQ ID NO: 121114 - protein, 10 aa, synthetic construct
DWDRGDLLLS

SEQ ID NO: 121115 - protein, 10 aa, synthetic construct
DWERGDLLLS

SEQ ID NO: 121116 - protein, 10 aa, synthetic construct
DFGRGDLLLS

SEQ ID NO: 121117 - protein, 10 aa, synthetic construct
DFARGDLLLS

SEQ ID NO: 121118 - protein, 10 aa, synthetic construct
DFVRGDLLLS

SEQ ID NO: 121119 - protein, 10 aa, synthetic construct
DFPRGDLLLS

SEQ ID NO: 121120 - protein, 10 aa, synthetic construct
DFLRGDLLLS

SEQ ID NO: 121121 - protein, 10 aa, synthetic construct
DFIRGDLLLS

SEQ ID NO: 121122 - protein, 10 aa, synthetic construct
DFMRGDLLLS

SEQ ID NO: 121123 - protein, 10 aa, synthetic construct
DFWRGDLLLS

SEQ ID NO: 121124 - protein, 10 aa, synthetic construct
DFFRGDLLLS

SEQ ID NO: 121125 - protein, 10 aa, synthetic construct
DFKRGDLLLS

SEQ ID NO: 121126 - protein, 10 aa, synthetic construct
DFRRGDLLLS

SEQ ID NO: 121127 - protein, 10 aa, synthetic construct
DFHRGDLLLS

SEQ ID NO: 121128 - protein, 10 aa, synthetic construct
DFSRGDLLLS

SEQ ID NO: 121129 - protein, 10 aa, synthetic construct
DFTRGDLLLS

SEQ ID NO: 121130 - protein, 10 aa, synthetic construct
DFYRGDLLLS

SEQ ID NO: 121131 - protein, 10 aa, synthetic construct
DFNRGDLLLS

SEQ ID NO: 121132 - protein, 10 aa, synthetic construct
DFQRGDLLLS

SEQ ID NO: 121133 - protein, 10 aa, synthetic construct
DFDRGDLLLS

SEQ ID NO: 121134 - protein, 10 aa, synthetic construct
DFERGDLLLS

SEQ ID NO: 121135 - protein, 10 aa, synthetic construct
DKGRGDLLLS

SEQ ID NO: 121136 - protein, 10 aa, synthetic construct
DKARGDLLLS

SEQ ID NO: 121137 - protein, 10 aa, synthetic construct
DKVRGDLLLS

SEQ ID NO: 121138 - protein, 10 aa, synthetic construct
DKPRGDLLLS

SEQ ID NO: 121139 - protein, 10 aa, synthetic construct
DKLRGDLLLS

SEQ ID NO: 121140 - protein, 10 aa, synthetic construct
DKIRGDLLLS

SEQ ID NO: 121141 - protein, 10 aa, synthetic construct
DKMRGDLLLS

SEQ ID NO: 121142 - protein, 10 aa, synthetic construct
DKWRGDLLLS

SEQ ID NO: 121143 - protein, 10 aa, synthetic construct
DKFRGDLLLS

SEQ ID NO: 121144 - protein, 10 aa, synthetic construct
DKKRGDLLLS

SEQ ID NO: 121145 - protein, 10 aa, synthetic construct
DKRRGDLLLS

SEQ ID NO: 121146 - protein, 10 aa, synthetic construct
DKHRGDLLLS

SEQ ID NO: 121147 - protein, 10 aa, synthetic construct
DKSRGDLLLS

SEQ ID NO: 121148 - protein, 10 aa, synthetic construct
DKTRGDLLLS

SEQ ID NO: 121149 - protein, 10 aa, synthetic construct
DKYRGDLLLS

SEQ ID NO: 121150 - protein, 10 aa, synthetic construct
DKNRGDLLLS

SEQ ID NO: 121151 - protein, 10 aa, synthetic construct
DKQRGDLLLS

SEQ ID NO: 121152 - protein, 10 aa, synthetic construct
DKDRGDLLLS

SEQ ID NO: 121153 - protein, 10 aa, synthetic construct
DKERGDLLLS

SEQ ID NO: 121154 - protein, 10 aa, synthetic construct
DRGRGDLLLS

SEQ ID NO: 121155 - protein, 10 aa, synthetic construct
DRARGDLLLS

SEQ ID NO: 121156 - protein, 10 aa, synthetic construct
DRVRGDLLLS

SEQ ID NO: 121157 - protein, 10 aa, synthetic construct
DRPRGDLLLS

SEQ ID NO: 121158 - protein, 10 aa, synthetic construct
DRLRGDLLLS

SEQ ID NO: 121159 - protein, 10 aa, synthetic construct
DRIRGDLLLS

SEQ ID NO: 121160 - protein, 10 aa, synthetic construct
DRMRGDLLLS

SEQ ID NO: 121161 - protein, 10 aa, synthetic construct
DRWRGDLLLS

SEQ ID NO: 121162 - protein, 10 aa, synthetic construct
DRFRGDLLLS

SEQ ID NO: 121163 - protein, 10 aa, synthetic construct
DRKRGDLLLS

SEQ ID NO: 121164 - protein, 10 aa, synthetic construct
DRRRGDLLLS

SEQ ID NO: 121165 - protein, 10 aa, synthetic construct
DRHRGDLLLS

SEQ ID NO: 121166 - protein, 10 aa, synthetic construct
DRSRGDLLLS

SEQ ID NO: 121167 - protein, 10 aa, synthetic construct
DRTRGDLLLS

SEQ ID NO: 121168 - protein, 10 aa, synthetic construct
DRYRGDLLLS

SEQ ID NO: 121169 - protein, 10 aa, synthetic construct
DRNRGDLLLS

SEQ ID NO: 121170 - protein, 10 aa, synthetic construct
DRQRGDLLLS

SEQ ID NO: 121171 - protein, 10 aa, synthetic construct
DRDRGDLLLS

SEQ ID NO: 121172 - protein, 10 aa, synthetic construct
DRERGDLLLS

SEQ ID NO: 121173 - protein, 10 aa, synthetic construct
DHGRGDLLLS

SEQ ID NO: 121174 - protein, 10 aa, synthetic construct
DHARGDLLLS

SEQ ID NO: 121175 - protein, 10 aa, synthetic construct
DHVRGDLLLS

SEQ ID NO: 121176 - protein, 10 aa, synthetic construct
DHPRGDLLLS

SEQ ID NO: 121177 - protein, 10 aa, synthetic construct
DHLRGDLLLS

SEQ ID NO: 121178 - protein, 10 aa, synthetic construct
DHIRGDLLLS

SEQ ID NO: 121179 - protein, 10 aa, synthetic construct
DHMRGDLLLS

SEQ ID NO: 121180 - protein, 10 aa, synthetic construct
DHWRGDLLLS

SEQ ID NO: 121181 - protein, 10 aa, synthetic construct
DHFRGDLLLS

SEQ ID NO: 121182 - protein, 10 aa, synthetic construct
DHKRGDLLLS

SEQ ID NO: 121183 - protein, 10 aa, synthetic construct
DHRRGDLLLS

SEQ ID NO: 121184 - protein, 10 aa, synthetic construct
DHHRGDLLLS

SEQ ID NO: 121185 - protein, 10 aa, synthetic construct
DHSRGDLLLS

SEQ ID NO: 121186 - protein, 10 aa, synthetic construct
DHTRGDLLLS

SEQ ID NO: 121187 - protein, 10 aa, synthetic construct
DHYRGDLLLS

SEQ ID NO: 121188 - protein, 10 aa, synthetic construct
DHNRGDLLLS

SEQ ID NO: 121189 - protein, 10 aa, synthetic construct
DHQRGDLLLS

SEQ ID NO: 121190 - protein, 10 aa, synthetic construct
DHDRGDLLLS

SEQ ID NO: 121191 - protein, 10 aa, synthetic construct
DHERGDLLLS

SEQ ID NO: 121192 - protein, 10 aa, synthetic construct
DSGRGDLLLS

SEQ ID NO: 121193 - protein, 10 aa, synthetic construct
DSARGDLLLS

SEQ ID NO: 121194 - protein, 10 aa, synthetic construct
DSVRGDLLLS

SEQ ID NO: 121195 - protein, 10 aa, synthetic construct
DSPRGDLLLS

SEQ ID NO: 121196 - protein, 10 aa, synthetic construct
DSLRGDLLLS

SEQ ID NO: 121197 - protein, 10 aa, synthetic construct
DSIRGDLLLS

SEQ ID NO: 121198 - protein, 10 aa, synthetic construct
DSMRGDLLLS

SEQ ID NO: 121199 - protein, 10 aa, synthetic construct
DSWRGDLLLS

SEQ ID NO: 121200 - protein, 10 aa, synthetic construct
DSFRGDLLLS

SEQ ID NO: 121201 - protein, 10 aa, synthetic construct
DSKRGDLLLS

SEQ ID NO: 121202 - protein, 10 aa, synthetic construct
DSRRGDLLLS

SEQ ID NO: 121203 - protein, 10 aa, synthetic construct
DSHRGDLLLS

SEQ ID NO: 121204 - protein, 10 aa, synthetic construct
DSSRGDLLLS

SEQ ID NO: 121205 - protein, 10 aa, synthetic construct
DSTRGDLLLS

SEQ ID NO: 121206 - protein, 10 aa, synthetic construct
DSYRGDLLLS

SEQ ID NO: 121207 - protein, 10 aa, synthetic construct
DSNRGDLLLS

SEQ ID NO: 121208 - protein, 10 aa, synthetic construct
DSQRGDLLLS

SEQ ID NO: 121209 - protein, 10 aa, synthetic construct
DSDRGDLLLS

SEQ ID NO: 121210 - protein, 10 aa, synthetic construct
DSERGDLLLS

SEQ ID NO: 121211 - protein, 10 aa, synthetic construct
DTGRGDLLLS

SEQ ID NO: 121212 - protein, 10 aa, synthetic construct
DTARGDLLLS

SEQ ID NO: 121213 - protein, 10 aa, synthetic construct
DTVRGDLLLS

SEQ ID NO: 121214 - protein, 10 aa, synthetic construct
DTPRGDLLLS

SEQ ID NO: 121215 - protein, 10 aa, synthetic construct
DTLRGDLLLS

SEQ ID NO: 121216 - protein, 10 aa, synthetic construct
DTIRGDLLLS

SEQ ID NO: 121217 - protein, 10 aa, synthetic construct
DTMRGDLLLS

SEQ ID NO: 121218 - protein, 10 aa, synthetic construct
DTWRGDLLLS

SEQ ID NO: 121219 - protein, 10 aa, synthetic construct
DTFRGDLLLS

SEQ ID NO: 121220 - protein, 10 aa, synthetic construct
DTKRGDLLLS

SEQ ID NO: 121221 - protein, 10 aa, synthetic construct
DTRRGDLLLS

SEQ ID NO: 121222 - protein, 10 aa, synthetic construct
DTHRGDLLLS

SEQ ID NO: 121223 - protein, 10 aa, synthetic construct
DTSRGDLLLS

SEQ ID NO: 121224 - protein, 10 aa, synthetic construct
DTTRGDLLLS

SEQ ID NO: 121225 - protein, 10 aa, synthetic construct
DTYRGDLLLS

SEQ ID NO: 121226 - protein, 10 aa, synthetic construct
DTNRGDLLLS

SEQ ID NO: 121227 - protein, 10 aa, synthetic construct
DTQRGDLLLS

SEQ ID NO: 121228 - protein, 10 aa, synthetic construct
DTDRGDLLLS

SEQ ID NO: 121229 - protein, 10 aa, synthetic construct
DTERGDLLLS

SEQ ID NO: 121230 - protein, 10 aa, synthetic construct
DYGRGDLLLS

SEQ ID NO: 121231 - protein, 10 aa, synthetic construct
DYARGDLLLS

SEQ ID NO: 121232 - protein, 10 aa, synthetic construct
DYVRGDLLLS

SEQ ID NO: 121233 - protein, 10 aa, synthetic construct
DYPRGDLLLS

SEQ ID NO: 121234 - protein, 10 aa, synthetic construct
DYLRGDLLLS

SEQ ID NO: 121235 - protein, 10 aa, synthetic construct
DYIRGDLLLS

SEQ ID NO: 121236 - protein, 10 aa, synthetic construct
DYMRGDLLLS

SEQ ID NO: 121237 - protein, 10 aa, synthetic construct
DYWRGDLLLS

SEQ ID NO: 121238 - protein, 10 aa, synthetic construct
DYFRGDLLLS

SEQ ID NO: 121239 - protein, 10 aa, synthetic construct
DYKRGDLLLS

SEQ ID NO: 121240 - protein, 10 aa, synthetic construct
DYRRGDLLLS

SEQ ID NO: 121241 - protein, 10 aa, synthetic construct
DYHRGDLLLS

SEQ ID NO: 121242 - protein, 10 aa, synthetic construct
DYSRGDLLLS

SEQ ID NO: 121243 - protein, 10 aa, synthetic construct
DYTRGDLLLS

SEQ ID NO: 121244 - protein, 10 aa, synthetic construct
DYYRGDLLLS

SEQ ID NO: 121245 - protein, 10 aa, synthetic construct
DYNRGDLLLS

SEQ ID NO: 121246 - protein, 10 aa, synthetic construct
DYQRGDLLLS

SEQ ID NO: 121247 - protein, 10 aa, synthetic construct
DYDRGDLLLS

SEQ ID NO: 121248 - protein, 10 aa, synthetic construct
DYERGDLLLS

SEQ ID NO: 121249 - protein, 10 aa, synthetic construct
DNGRGDLLLS

SEQ ID NO: 121250 - protein, 10 aa, synthetic construct
DNARGDLLLS

SEQ ID NO: 121251 - protein, 10 aa, synthetic construct
DNVRGDLLLS

SEQ ID NO: 121252 - protein, 10 aa, synthetic construct
DNPRGDLLLS

SEQ ID NO: 121253 - protein, 10 aa, synthetic construct
DNLRGDLLLS

SEQ ID NO: 121254 - protein, 10 aa, synthetic construct
DNIRGDLLLS

SEQ ID NO: 121255 - protein, 10 aa, synthetic construct
DNMRGDLLLS

SEQ ID NO: 121256 - protein, 10 aa, synthetic construct
DNWRGDLLLS

SEQ ID NO: 121257 - protein, 10 aa, synthetic construct
DNFRGDLLLS

SEQ ID NO: 121258 - protein, 10 aa, synthetic construct
DNKRGDLLLS

SEQ ID NO: 121259 - protein, 10 aa, synthetic construct
DNRRGDLLLS

SEQ ID NO: 121260 - protein, 10 aa, synthetic construct
DNHRGDLLLS

SEQ ID NO: 121261 - protein, 10 aa, synthetic construct
DNSRGDLLLS

SEQ ID NO: 121262 - protein, 10 aa, synthetic construct
DNTRGDLLLS

SEQ ID NO: 121263 - protein, 10 aa, synthetic construct
DNYRGDLLLS

SEQ ID NO: 121264 - protein, 10 aa, synthetic construct
DNNRGDLLLS

SEQ ID NO: 121265 - protein, 10 aa, synthetic construct
DNQRGDLLLS

SEQ ID NO: 121266 - protein, 10 aa, synthetic construct
DNDRGDLLLS

SEQ ID NO: 121267 - protein, 10 aa, synthetic construct
DNERGDLLLS

SEQ ID NO: 121268 - protein, 10 aa, synthetic construct
DQGRGDLLLS

SEQ ID NO: 121269 - protein, 10 aa, synthetic construct
DQARGDLLLS

SEQ ID NO: 121270 - protein, 10 aa, synthetic construct
DQVRGDLLLS

SEQ ID NO: 121271 - protein, 10 aa, synthetic construct
DQPRGDLLLS

SEQ ID NO: 121272 - protein, 10 aa, synthetic construct
DQLRGDLLLS

SEQ ID NO: 121273 - protein, 10 aa, synthetic construct
DQIRGDLLLS

SEQ ID NO: 121274 - protein, 10 aa, synthetic construct
DQMRGDLLLS

SEQ ID NO: 121275 - protein, 10 aa, synthetic construct
DQWRGDLLLS

SEQ ID NO: 121276 - protein, 10 aa, synthetic construct
DQFRGDLLLS

SEQ ID NO: 121277 - protein, 10 aa, synthetic construct
DQKRGDLLLS

SEQ ID NO: 121278 - protein, 10 aa, synthetic construct
DQRRGDLLLS

SEQ ID NO: 121279 - protein, 10 aa, synthetic construct
DQHRGDLLLS

SEQ ID NO: 121280 - protein, 10 aa, synthetic construct
DQSRGDLLLS

SEQ ID NO: 121281 - protein, 10 aa, synthetic construct
DQTRGDLLLS

SEQ ID NO: 121282 - protein, 10 aa, synthetic construct
DQYRGDLLLS

SEQ ID NO: 121283 - protein, 10 aa, synthetic construct
DQNRGDLLLS

SEQ ID NO: 121284 - protein, 10 aa, synthetic construct
DQQRGDLLLS

SEQ ID NO: 121285 - protein, 10 aa, synthetic construct
DQDRGDLLLS

SEQ ID NO: 121286 - protein, 10 aa, synthetic construct
DQERGDLLLS

SEQ ID NO: 121287 - protein, 10 aa, synthetic construct
DDGRGDLLLS

SEQ ID NO: 121288 - protein, 10 aa, synthetic construct
DDARGDLLLS

SEQ ID NO: 121289 - protein, 10 aa, synthetic construct
DDVRGDLLLS

SEQ ID NO: 121290 - protein, 10 aa, synthetic construct
DDPRGDLLLS

SEQ ID NO: 121291 - protein, 10 aa, synthetic construct
DDLRGDLLLS

SEQ ID NO: 121292 - protein, 10 aa, synthetic construct
DDIRGDLLLS

SEQ ID NO: 121293 - protein, 10 aa, synthetic construct
DDMRGDLLLS

SEQ ID NO: 121294 - protein, 10 aa, synthetic construct
DDWRGDLLLS

SEQ ID NO: 121295 - protein, 10 aa, synthetic construct
DDFRGDLLLS

SEQ ID NO: 121296 - protein, 10 aa, synthetic construct
DDKRGDLLLS

SEQ ID NO: 121297 - protein, 10 aa, synthetic construct
DDRRGDLLLS

SEQ ID NO: 121298 - protein, 10 aa, synthetic construct
DDHRGDLLLS

SEQ ID NO: 121299 - protein, 10 aa, synthetic construct
DDSRGDLLLS

SEQ ID NO: 121300 - protein, 10 aa, synthetic construct
DDTRGDLLLS

SEQ ID NO: 121301 - protein, 10 aa, synthetic construct
DDYRGDLLLS

SEQ ID NO: 121302 - protein, 10 aa, synthetic construct
DDNRGDLLLS

SEQ ID NO: 121303 - protein, 10 aa, synthetic construct
DDQRGDLLLS

SEQ ID NO: 121304 - protein, 10 aa, synthetic construct
DDDRGDLLLS

SEQ ID NO: 121305 - protein, 10 aa, synthetic construct
DDERGDLLLS

SEQ ID NO: 121306 - protein, 10 aa, synthetic construct
DEGRGDLLLS

SEQ ID NO: 121307 - protein, 10 aa, synthetic construct
DEARGDLLLS

SEQ ID NO: 121308 - protein, 10 aa, synthetic construct
DEVRGDLLLS

SEQ ID NO: 121309 - protein, 10 aa, synthetic construct
DEPRGDLLLS

SEQ ID NO: 121310 - protein, 10 aa, synthetic construct
DELRGDLLLS

SEQ ID NO: 121311 - protein, 10 aa, synthetic construct
DEIRGDLLLS

SEQ ID NO: 121312 - protein, 10 aa, synthetic construct
DEMRGDLLLS

SEQ ID NO: 121313 - protein, 10 aa, synthetic construct
DEWRGDLLLS

SEQ ID NO: 121314 - protein, 10 aa, synthetic construct
DEFRGDLLLS

SEQ ID NO: 121315 - protein, 10 aa, synthetic construct
DEKRGDLLLS

SEQ ID NO: 121316 - protein, 10 aa, synthetic construct
DERRGDLLLS

SEQ ID NO: 121317 - protein, 10 aa, synthetic construct
DEHRGDLLLS

SEQ ID NO: 121318 - protein, 10 aa, synthetic construct
DESRGDLLLS

SEQ ID NO: 121319 - protein, 10 aa, synthetic construct
DETRGDLLLS

SEQ ID NO: 121320 - protein, 10 aa, synthetic construct
DEYRGDLLLS

SEQ ID NO: 121321 - protein, 10 aa, synthetic construct
DENRGDLLLS

SEQ ID NO: 121322 - protein, 10 aa, synthetic construct
DEQRGDLLLS

SEQ ID NO: 121323 - protein, 10 aa, synthetic construct
DEDRGDLLLS

SEQ ID NO: 121324 - protein, 10 aa, synthetic construct
DEERGDLLLS

SEQ ID NO: 121325 - protein, 10 aa, synthetic construct
QGGRGDLLLS

SEQ ID NO: 121326 - protein, 10 aa, synthetic construct
QGARGDLLLS

SEQ ID NO: 121327 - protein, 10 aa, synthetic construct
QGVRGDLLLS

SEQ ID NO: 121328 - protein, 10 aa, synthetic construct
QGPRGDLLLS

SEQ ID NO: 121329 - protein, 10 aa, synthetic construct
QGLRGDLLLS

SEQ ID NO: 121330 - protein, 10 aa, synthetic construct
QGIRGDLLLS

SEQ ID NO: 121331 - protein, 10 aa, synthetic construct
QGMRGDLLLS

SEQ ID NO: 121332 - protein, 10 aa, synthetic construct
QGWRGDLLLS

SEQ ID NO: 121333 - protein, 10 aa, synthetic construct
QGFRGDLLLS

SEQ ID NO: 121334 - protein, 10 aa, synthetic construct
QGKRGDLLLS

SEQ ID NO: 121335 - protein, 10 aa, synthetic construct
QGRRGDLLLS

SEQ ID NO: 121336 - protein, 10 aa, synthetic construct
QGHRGDLLLS

SEQ ID NO: 121337 - protein, 10 aa, synthetic construct
QGSRGDLLLS

SEQ ID NO: 121338 - protein, 10 aa, synthetic construct
QGTRGDLLLS

SEQ ID NO: 121339 - protein, 10 aa, synthetic construct
QGYRGDLLLS

SEQ ID NO: 121340 - protein, 10 aa, synthetic construct
QGNRGDLLLS

SEQ ID NO: 121341 - protein, 10 aa, synthetic construct
QGQRGDLLLS

SEQ ID NO: 121342 - protein, 10 aa, synthetic construct
QGDRGDLLLS

SEQ ID NO: 121343 - protein, 10 aa, synthetic construct
QGERGDLLLS

SEQ ID NO: 121344 - protein, 10 aa, synthetic construct
QAGRGDLLLS

SEQ ID NO: 121345 - protein, 10 aa, synthetic construct
QAARGDLLLS

SEQ ID NO: 121346 - protein, 10 aa, synthetic construct
QAVRGDLLLS

SEQ ID NO: 121347 - protein, 10 aa, synthetic construct
QAPRGDLLLS

SEQ ID NO: 121348 - protein, 10 aa, synthetic construct
QALRGDLLLS

SEQ ID NO: 121349 - protein, 10 aa, synthetic construct
QAIRGDLLLS

SEQ ID NO: 121350 - protein, 10 aa, synthetic construct
QAMRGDLLLS

SEQ ID NO: 121351 - protein, 10 aa, synthetic construct
QAWRGDLLLS

SEQ ID NO: 121352 - protein, 10 aa, synthetic construct
QAFRGDLLLS

SEQ ID NO: 121353 - protein, 10 aa, synthetic construct
QAKRGDLLLS

SEQ ID NO: 121354 - protein, 10 aa, synthetic construct
QARRGDLLLS

SEQ ID NO: 121355 - protein, 10 aa, synthetic construct
QAHRGDLLLS

SEQ ID NO: 121356 - protein, 10 aa, synthetic construct
QASRGDLLLS

SEQ ID NO: 121357 - protein, 10 aa, synthetic construct
QATRGDLLLS

SEQ ID NO: 121358 - protein, 10 aa, synthetic construct
QAYRGDLLLS

SEQ ID NO: 121359 - protein, 10 aa, synthetic construct
QANRGDLLLS

SEQ ID NO: 121360 - protein, 10 aa, synthetic construct
QAQRGDLLLS

SEQ ID NO: 121361 - protein, 10 aa, synthetic construct
QADRGDLLLS

SEQ ID NO: 121362 - protein, 10 aa, synthetic construct
QAERGDLLLS

SEQ ID NO: 121363 - protein, 10 aa, synthetic construct
QVGRGDLLLS

SEQ ID NO: 121364 - protein, 10 aa, synthetic construct
QVARGDLLLS

SEQ ID NO: 121365 - protein, 10 aa, synthetic construct
QVVRGDLLLS

SEQ ID NO: 121366 - protein, 10 aa, synthetic construct
QVPRGDLLLS

SEQ ID NO: 121367 - protein, 10 aa, synthetic construct
QVLRGDLLLS

SEQ ID NO: 121368 - protein, 10 aa, synthetic construct
QVIRGDLLLS

SEQ ID NO: 121369 - protein, 10 aa, synthetic construct
QVMRGDLLLS

SEQ ID NO: 121370 - protein, 10 aa, synthetic construct
QVWRGDLLLS

SEQ ID NO: 121371 - protein, 10 aa, synthetic construct
QVFRGDLLLS

SEQ ID NO: 121372 - protein, 10 aa, synthetic construct
QVKRGDLLLS

SEQ ID NO: 121373 - protein, 10 aa, synthetic construct
QVRRGDLLLS

SEQ ID NO: 121374 - protein, 10 aa, synthetic construct
QVHRGDLLLS

SEQ ID NO: 121375 - protein, 10 aa, synthetic construct
QVSRGDLLLS

SEQ ID NO: 121376 - protein, 10 aa, synthetic construct
QVTRGDLLLS

SEQ ID NO: 121377 - protein, 10 aa, synthetic construct
QVYRGDLLLS

SEQ ID NO: 121378 - protein, 10 aa, synthetic construct
QVNRGDLLLS

SEQ ID NO: 121379 - protein, 10 aa, synthetic construct
QVQRGDLLLS

SEQ ID NO: 121380 - protein, 10 aa, synthetic construct
QVDRGDLLLS

SEQ ID NO: 121381 - protein, 10 aa, synthetic construct
QVERGDLLLS

SEQ ID NO: 121382 - protein, 10 aa, synthetic construct
QPGRGDLLLS

SEQ ID NO: 121383 - protein, 10 aa, synthetic construct
QPARGDLLLS

SEQ ID NO: 121384 - protein, 10 aa, synthetic construct
QPVRGDLLLS

SEQ ID NO: 121385 - protein, 10 aa, synthetic construct
QPPRGDLLLS

SEQ ID NO: 121386 - protein, 10 aa, synthetic construct
QPLRGDLLLS

SEQ ID NO: 121387 - protein, 10 aa, synthetic construct
QPIRGDLLLS

SEQ ID NO: 121388 - protein, 10 aa, synthetic construct
QPMRGDLLLS

SEQ ID NO: 121389 - protein, 10 aa, synthetic construct
QPWRGDLLLS

SEQ ID NO: 121390 - protein, 10 aa, synthetic construct
QPFRGDLLLS

SEQ ID NO: 121391 - protein, 10 aa, synthetic construct
QPKRGDLLLS

SEQ ID NO: 121392 - protein, 10 aa, synthetic construct
QPRRGDLLLS

SEQ ID NO: 121393 - protein, 10 aa, synthetic construct
QPHRGDLLLS

SEQ ID NO: 121394 - protein, 10 aa, synthetic construct
QPSRGDLLLS

SEQ ID NO: 121395 - protein, 10 aa, synthetic construct
QPTRGDLLLS

SEQ ID NO: 121396 - protein, 10 aa, synthetic construct
QPYRGDLLLS

SEQ ID NO: 121397 - protein, 10 aa, synthetic construct
QPNRGDLLLS

SEQ ID NO: 121398 - protein, 10 aa, synthetic construct
QPQRGDLLLS

SEQ ID NO: 121399 - protein, 10 aa, synthetic construct
QPDRGDLLLS

SEQ ID NO: 121400 - protein, 10 aa, synthetic construct
QPERGDLLLS

SEQ ID NO: 121401 - protein, 10 aa, synthetic construct
QLGRGDLLLS

SEQ ID NO: 121402 - protein, 10 aa, synthetic construct
QLARGDLLLS

SEQ ID NO: 121403 - protein, 10 aa, synthetic construct
QLVRGDLLLS

SEQ ID NO: 121404 - protein, 10 aa, synthetic construct
QLPRGDLLLS

SEQ ID NO: 121405 - protein, 10 aa, synthetic construct
QLLRGDLLLS

SEQ ID NO: 121406 - protein, 10 aa, synthetic construct
QLIRGDLLLS

SEQ ID NO: 121407 - protein, 10 aa, synthetic construct
QLMRGDLLLS

SEQ ID NO: 121408 - protein, 10 aa, synthetic construct
QLWRGDLLLS

SEQ ID NO: 121409 - protein, 10 aa, synthetic construct
QLFRGDLLLS

SEQ ID NO: 121410 - protein, 10 aa, synthetic construct
QLKRGDLLLS

SEQ ID NO: 121411 - protein, 10 aa, synthetic construct
QLRRGDLLLS

SEQ ID NO: 121412 - protein, 10 aa, synthetic construct
QLHRGDLLLS

SEQ ID NO: 121413 - protein, 10 aa, synthetic construct
QLSRGDLLLS

SEQ ID NO: 121414 - protein, 10 aa, synthetic construct
QLTRGDLLLS

SEQ ID NO: 121415 - protein, 10 aa, synthetic construct
QLYRGDLLLS

SEQ ID NO: 121416 - protein, 10 aa, synthetic construct
QLNRGDLLLS

SEQ ID NO: 121417 - protein, 10 aa, synthetic construct
QLQRGDLLLS

SEQ ID NO: 121418 - protein, 10 aa, synthetic construct
QLDRGDLLLS

SEQ ID NO: 121419 - protein, 10 aa, synthetic construct
QLERGDLLLS

SEQ ID NO: 121420 - protein, 10 aa, synthetic construct
QIGRGDLLLS

SEQ ID NO: 121421 - protein, 10 aa, synthetic construct
QIARGDLLLS

SEQ ID NO: 121422 - protein, 10 aa, synthetic construct
QIVRGDLLLS

SEQ ID NO: 121423 - protein, 10 aa, synthetic construct
QIPRGDLLLS

SEQ ID NO: 121424 - protein, 10 aa, synthetic construct
QILRGDLLLS

SEQ ID NO: 121425 - protein, 10 aa, synthetic construct
QIIRGDLLLS

SEQ ID NO: 121426 - protein, 10 aa, synthetic construct
QIMRGDLLLS

SEQ ID NO: 121427 - protein, 10 aa, synthetic construct
QIWRGDLLLS

SEQ ID NO: 121428 - protein, 10 aa, synthetic construct
QIFRGDLLLS

SEQ ID NO: 121429 - protein, 10 aa, synthetic construct
QIKRGDLLLS

SEQ ID NO: 121430 - protein, 10 aa, synthetic construct
QIRRGDLLLS

SEQ ID NO: 121431 - protein, 10 aa, synthetic construct
QIHRGDLLLS

SEQ ID NO: 121432 - protein, 10 aa, synthetic construct
QISRGDLLLS

SEQ ID NO: 121433 - protein, 10 aa, synthetic construct
QITRGDLLLS

SEQ ID NO: 121434 - protein, 10 aa, synthetic construct
QIYRGDLLLS

SEQ ID NO: 121435 - protein, 10 aa, synthetic construct
QINRGDLLLS

SEQ ID NO: 121436 - protein, 10 aa, synthetic construct
QIQRGDLLLS

SEQ ID NO: 121437 - protein, 10 aa, synthetic construct
QIDRGDLLLS

SEQ ID NO: 121438 - protein, 10 aa, synthetic construct
QIERGDLLLS

SEQ ID NO: 121439 - protein, 10 aa, synthetic construct
QMGRGDLLLS

SEQ ID NO: 121440 - protein, 10 aa, synthetic construct
QMARGDLLLS

SEQ ID NO: 121441 - protein, 10 aa, synthetic construct
QMVRGDLLLS

SEQ ID NO: 121442 - protein, 10 aa, synthetic construct
QMPRGDLLLS

SEQ ID NO: 121443 - protein, 10 aa, synthetic construct
QMLRGDLLLS

SEQ ID NO: 121444 - protein, 10 aa, synthetic construct
QMIRGDLLLS

SEQ ID NO: 121445 - protein, 10 aa, synthetic construct
QMMRGDLLLS

SEQ ID NO: 121446 - protein, 10 aa, synthetic construct
QMWRGDLLLS

SEQ ID NO: 121447 - protein, 10 aa, synthetic construct
QMFRGDLLLS

SEQ ID NO: 121448 - protein, 10 aa, synthetic construct
QMKRGDLLLS

SEQ ID NO: 121449 - protein, 10 aa, synthetic construct
QMRRGDLLLS

SEQ ID NO: 121450 - protein, 10 aa, synthetic construct
QMHRGDLLLS

SEQ ID NO: 121451 - protein, 10 aa, synthetic construct
QMSRGDLLLS

SEQ ID NO: 121452 - protein, 10 aa, synthetic construct
QMTRGDLLLS

SEQ ID NO: 121453 - protein, 10 aa, synthetic construct
QMYRGDLLLS

SEQ ID NO: 121454 - protein, 10 aa, synthetic construct
QMNRGDLLLS

SEQ ID NO: 121455 - protein, 10 aa, synthetic construct
QMQRGDLLLS

SEQ ID NO: 121456 - protein, 10 aa, synthetic construct
QMDRGDLLLS

SEQ ID NO: 121457 - protein, 10 aa, synthetic construct
QMERGDLLLS

SEQ ID NO: 121458 - protein, 10 aa, synthetic construct
QWGRGDLLLS

SEQ ID NO: 121459 - protein, 10 aa, synthetic construct
QWARGDLLLS

SEQ ID NO: 121460 - protein, 10 aa, synthetic construct
QWVRGDLLLS

SEQ ID NO: 121461 - protein, 10 aa, synthetic construct
QWPRGDLLLS

SEQ ID NO: 121462 - protein, 10 aa, synthetic construct
QWLRGDLLLS

SEQ ID NO: 121463 - protein, 10 aa, synthetic construct
QWIRGDLLLS

SEQ ID NO: 121464 - protein, 10 aa, synthetic construct
QWMRGDLLLS

SEQ ID NO: 121465 - protein, 10 aa, synthetic construct
QWWRGDLLLS

SEQ ID NO: 121466 - protein, 10 aa, synthetic construct
QWFRGDLLLS

SEQ ID NO: 121467 - protein, 10 aa, synthetic construct
QWKRGDLLLS

SEQ ID NO: 121468 - protein, 10 aa, synthetic construct
QWRRGDLLLS

SEQ ID NO: 121469 - protein, 10 aa, synthetic construct
QWHRGDLLLS

SEQ ID NO: 121470 - protein, 10 aa, synthetic construct
QWSRGDLLLS

SEQ ID NO: 121471 - protein, 10 aa, synthetic construct
QWTRGDLLLS

SEQ ID NO: 121472 - protein, 10 aa, synthetic construct
QWYRGDLLLS

SEQ ID NO: 121473 - protein, 10 aa, synthetic construct
QWNRGDLLLS

SEQ ID NO: 121474 - protein, 10 aa, synthetic construct
QWQRGDLLLS

SEQ ID NO: 121475 - protein, 10 aa, synthetic construct
QWDRGDLLLS

SEQ ID NO: 121476 - protein, 10 aa, synthetic construct
QWERGDLLLS

SEQ ID NO: 121477 - protein, 10 aa, synthetic construct
QFGRGDLLLS

SEQ ID NO: 121478 - protein, 10 aa, synthetic construct
QFARGDLLLS

SEQ ID NO: 121479 - protein, 10 aa, synthetic construct
QFVRGDLLLS

SEQ ID NO: 121480 - protein, 10 aa, synthetic construct
QFPRGDLLLS

SEQ ID NO: 121481 - protein, 10 aa, synthetic construct
QFLRGDLLLS

SEQ ID NO: 121482 - protein, 10 aa, synthetic construct
QFIRGDLLLS

SEQ ID NO: 121483 - protein, 10 aa, synthetic construct
QFMRGDLLLS

SEQ ID NO: 121484 - protein, 10 aa, synthetic construct
QFWRGDLLLS

SEQ ID NO: 121485 - protein, 10 aa, synthetic construct
QFFRGDLLLS

SEQ ID NO: 121486 - protein, 10 aa, synthetic construct
QFKRGDLLLS

SEQ ID NO: 121487 - protein, 10 aa, synthetic construct
QFRRGDLLLS

SEQ ID NO: 121488 - protein, 10 aa, synthetic construct
QFHRGDLLLS

SEQ ID NO: 121489 - protein, 10 aa, synthetic construct
QFSRGDLLLS

SEQ ID NO: 121490 - protein, 10 aa, synthetic construct
QFTRGDLLLS

SEQ ID NO: 121491 - protein, 10 aa, synthetic construct
QFYRGDLLLS

SEQ ID NO: 121492 - protein, 10 aa, synthetic construct
QFNRGDLLLS

SEQ ID NO: 121493 - protein, 10 aa, synthetic construct
QFQRGDLLLS

SEQ ID NO: 121494 - protein, 10 aa, synthetic construct
QFDRGDLLLS

SEQ ID NO: 121495 - protein, 10 aa, synthetic construct
QFERGDLLLS

SEQ ID NO: 121496 - protein, 10 aa, synthetic construct
QKGRGDLLLS

SEQ ID NO: 121497 - protein, 10 aa, synthetic construct
QKARGDLLLS

SEQ ID NO: 121498 - protein, 10 aa, synthetic construct
QKVRGDLLLS

SEQ ID NO: 121499 - protein, 10 aa, synthetic construct
QKPRGDLLLS

SEQ ID NO: 121500 - protein, 10 aa, synthetic construct
QKLRGDLLLS

SEQ ID NO: 121501 - protein, 10 aa, synthetic construct
QKIRGDLLLS

SEQ ID NO: 121502 - protein, 10 aa, synthetic construct
QKMRGDLLLS

SEQ ID NO: 121503 - protein, 10 aa, synthetic construct
QKWRGDLLLS

SEQ ID NO: 121504 - protein, 10 aa, synthetic construct
QKFRGDLLLS

SEQ ID NO: 121505 - protein, 10 aa, synthetic construct
QKKRGDLLLS

SEQ ID NO: 121506 - protein, 10 aa, synthetic construct
QKRRGDLLLS

SEQ ID NO: 121507 - protein, 10 aa, synthetic construct
QKHRGDLLLS

SEQ ID NO: 121508 - protein, 10 aa, synthetic construct
QKSRGDLLLS

SEQ ID NO: 121509 - protein, 10 aa, synthetic construct
QKTRGDLLLS

SEQ ID NO: 121510 - protein, 10 aa, synthetic construct
QKYRGDLLLS

SEQ ID NO: 121511 - protein, 10 aa, synthetic construct
QKNRGDLLLS

SEQ ID NO: 121512 - protein, 10 aa, synthetic construct
QKQRGDLLLS

SEQ ID NO: 121513 - protein, 10 aa, synthetic construct
QKDRGDLLLS

SEQ ID NO: 121514 - protein, 10 aa, synthetic construct
QKERGDLLLS

SEQ ID NO: 121515 - protein, 10 aa, synthetic construct
QRGRGDLLLS

SEQ ID NO: 121516 - protein, 10 aa, synthetic construct
QRARGDLLLS

SEQ ID NO: 121517 - protein, 10 aa, synthetic construct
QRVRGDLLLS

SEQ ID NO: 121518 - protein, 10 aa, synthetic construct
QRPRGDLLLS

SEQ ID NO: 121519 - protein, 10 aa, synthetic construct
QRLRGDLLLS

SEQ ID NO: 121520 - protein, 10 aa, synthetic construct
QRIRGDLLLS

SEQ ID NO: 121521 - protein, 10 aa, synthetic construct
QRMRGDLLLS

SEQ ID NO: 121522 - protein, 10 aa, synthetic construct
QRWRGDLLLS

SEQ ID NO: 121523 - protein, 10 aa, synthetic construct
QRFRGDLLLS

SEQ ID NO: 121524 - protein, 10 aa, synthetic construct
QRKRGDLLLS

SEQ ID NO: 121525 - protein, 10 aa, synthetic construct
QRRRGDLLLS

SEQ ID NO: 121526 - protein, 10 aa, synthetic construct
QRHRGDLLLS

SEQ ID NO: 121527 - protein, 10 aa, synthetic construct
QRSRGDLLLS

SEQ ID NO: 121528 - protein, 10 aa, synthetic construct
QRTRGDLLLS

SEQ ID NO: 121529 - protein, 10 aa, synthetic construct
QRYRGDLLLS

SEQ ID NO: 121530 - protein, 10 aa, synthetic construct
QRNRGDLLLS

SEQ ID NO: 121531 - protein, 10 aa, synthetic construct
QRQRGDLLLS

SEQ ID NO: 121532 - protein, 10 aa, synthetic construct
QRDRGDLLLS

SEQ ID NO: 121533 - protein, 10 aa, synthetic construct
QRERGDLLLS

SEQ ID NO: 121534 - protein, 10 aa, synthetic construct
QHGRGDLLLS

SEQ ID NO: 121535 - protein, 10 aa, synthetic construct
QHARGDLLLS

SEQ ID NO: 121536 - protein, 10 aa, synthetic construct
QHVRGDLLLS

SEQ ID NO: 121537 - protein, 10 aa, synthetic construct
QHPRGDLLLS

SEQ ID NO: 121538 - protein, 10 aa, synthetic construct
QHLRGDLLLS

SEQ ID NO: 121539 - protein, 10 aa, synthetic construct
QHIRGDLLLS

SEQ ID NO: 121540 - protein, 10 aa, synthetic construct
QHMRGDLLLS

SEQ ID NO: 121541 - protein, 10 aa, synthetic construct
QHWRGDLLLS

SEQ ID NO: 121542 - protein, 10 aa, synthetic construct
QHFRGDLLLS

SEQ ID NO: 121543 - protein, 10 aa, synthetic construct
QHKRGDLLLS

SEQ ID NO: 121544 - protein, 10 aa, synthetic construct
QHRRGDLLLS

SEQ ID NO: 121545 - protein, 10 aa, synthetic construct
QHHRGDLLLS

SEQ ID NO: 121546 - protein, 10 aa, synthetic construct
QHSRGDLLLS

SEQ ID NO: 121547 - protein, 10 aa, synthetic construct
QHTRGDLLLS

SEQ ID NO: 121548 - protein, 10 aa, synthetic construct
QHYRGDLLLS

SEQ ID NO: 121549 - protein, 10 aa, synthetic construct
QHNRGDLLLS

SEQ ID NO: 121550 - protein, 10 aa, synthetic construct
QHQRGDLLLS

SEQ ID NO: 121551 - protein, 10 aa, synthetic construct
QHDRGDLLLS

SEQ ID NO: 121552 - protein, 10 aa, synthetic construct
QHERGDLLLS

SEQ ID NO: 121553 - protein, 10 aa, synthetic construct
QSGRGDLLLS

SEQ ID NO: 121554 - protein, 10 aa, synthetic construct
QSARGDLLLS

SEQ ID NO: 121555 - protein, 10 aa, synthetic construct
QSVRGDLLLS

SEQ ID NO: 121556 - protein, 10 aa, synthetic construct
QSPRGDLLLS

SEQ ID NO: 121557 - protein, 10 aa, synthetic construct
QSLRGDLLLS

SEQ ID NO: 121558 - protein, 10 aa, synthetic construct
QSIRGDLLLS

SEQ ID NO: 121559 - protein, 10 aa, synthetic construct
QSMRGDLLLS

SEQ ID NO: 121560 - protein, 10 aa, synthetic construct
QSWRGDLLLS

SEQ ID NO: 121561 - protein, 10 aa, synthetic construct
QSFRGDLLLS

SEQ ID NO: 121562 - protein, 10 aa, synthetic construct
QSKRGDLLLS

SEQ ID NO: 121563 - protein, 10 aa, synthetic construct
QSRRGDLLLS

SEQ ID NO: 121564 - protein, 10 aa, synthetic construct
QSHRGDLLLS

SEQ ID NO: 121565 - protein, 10 aa, synthetic construct
QSSRGDLLLS

SEQ ID NO: 121566 - protein, 10 aa, synthetic construct
QSTRGDLLLS

SEQ ID NO: 121567 - protein, 10 aa, synthetic construct
QSYRGDLLLS

SEQ ID NO: 121568 - protein, 10 aa, synthetic construct
QSNRGDLLLS

SEQ ID NO: 121569 - protein, 10 aa, synthetic construct
QSQRGDLLLS

SEQ ID NO: 121570 - protein, 10 aa, synthetic construct
QSDRGDLLLS

SEQ ID NO: 121571 - protein, 10 aa, synthetic construct
QSERGDLLLS

SEQ ID NO: 121572 - protein, 10 aa, synthetic construct
QTGRGDLLLS

SEQ ID NO: 121573 - protein, 10 aa, synthetic construct
QTARGDLLLS

SEQ ID NO: 121574 - protein, 10 aa, synthetic construct
QTVRGDLLLS

SEQ ID NO: 121575 - protein, 10 aa, synthetic construct
QTPRGDLLLS

SEQ ID NO: 121576 - protein, 10 aa, synthetic construct
QTLRGDLLLS

SEQ ID NO: 121577 - protein, 10 aa, synthetic construct
QTIRGDLLLS

SEQ ID NO: 121578 - protein, 10 aa, synthetic construct
QTMRGDLLLS

SEQ ID NO: 121579 - protein, 10 aa, synthetic construct
QTWRGDLLLS

SEQ ID NO: 121580 - protein, 10 aa, synthetic construct
QTFRGDLLLS

SEQ ID NO: 121581 - protein, 10 aa, synthetic construct
QTKRGDLLLS

SEQ ID NO: 121582 - protein, 10 aa, synthetic construct
QTRRGDLLLS

SEQ ID NO: 121583 - protein, 10 aa, synthetic construct
QTHRGDLLLS

SEQ ID NO: 121584 - protein, 10 aa, synthetic construct
QTSRGDLLLS

SEQ ID NO: 121585 - protein, 10 aa, synthetic construct
QTTRGDLLLS

SEQ ID NO: 121586 - protein, 10 aa, synthetic construct
QTYRGDLLLS

SEQ ID NO: 121587 - protein, 10 aa, synthetic construct
QTNRGDLLLS

SEQ ID NO: 121588 - protein, 10 aa, synthetic construct
QTQRGDLLLS

SEQ ID NO: 121589 - protein, 10 aa, synthetic construct
QTDRGDLLLS

SEQ ID NO: 121590 - protein, 10 aa, synthetic construct
QTERGDLLLS

SEQ ID NO: 121591 - protein, 10 aa, synthetic construct
QYGRGDLLLS

SEQ ID NO: 121592 - protein, 10 aa, synthetic construct
QYARGDLLLS

SEQ ID NO: 121593 - protein, 10 aa, synthetic construct
QYVRGDLLLS

SEQ ID NO: 121594 - protein, 10 aa, synthetic construct
QYPRGDLLLS

SEQ ID NO: 121595 - protein, 10 aa, synthetic construct
QYLRGDLLLS

SEQ ID NO: 121596 - protein, 10 aa, synthetic construct
QYIRGDLLLS

SEQ ID NO: 121597 - protein, 10 aa, synthetic construct
QYMRGDLLLS

SEQ ID NO: 121598 - protein, 10 aa, synthetic construct
QYWRGDLLLS

SEQ ID NO: 121599 - protein, 10 aa, synthetic construct
QYFRGDLLLS

SEQ ID NO: 121600 - protein, 10 aa, synthetic construct
QYKRGDLLLS

SEQ ID NO: 121601 - protein, 10 aa, synthetic construct
QYRRGDLLLS

SEQ ID NO: 121602 - protein, 10 aa, synthetic construct
QYHRGDLLLS

SEQ ID NO: 121603 - protein, 10 aa, synthetic construct
QYSRGDLLLS

SEQ ID NO: 121604 - protein, 10 aa, synthetic construct
QYTRGDLLLS

SEQ ID NO: 121605 - protein, 10 aa, synthetic construct
QYYRGDLLLS

SEQ ID NO: 121606 - protein, 10 aa, synthetic construct
QYNRGDLLLS

SEQ ID NO: 121607 - protein, 10 aa, synthetic construct
QYQRGDLLLS

SEQ ID NO: 121608 - protein, 10 aa, synthetic construct
QYDRGDLLLS

SEQ ID NO: 121609 - protein, 10 aa, synthetic construct
QYERGDLLLS

SEQ ID NO: 121610 - protein, 10 aa, synthetic construct
QNGRGDLLLS

SEQ ID NO: 121611 - protein, 10 aa, synthetic construct
QNARGDLLLS

SEQ ID NO: 121612 - protein, 10 aa, synthetic construct
QNVRGDLLLS

SEQ ID NO: 121613 - protein, 10 aa, synthetic construct
QNPRGDLLLS

SEQ ID NO: 121614 - protein, 10 aa, synthetic construct
QNLRGDLLLS

SEQ ID NO: 121615 - protein, 10 aa, synthetic construct
QNIRGDLLLS

SEQ ID NO: 121616 - protein, 10 aa, synthetic construct
QNMRGDLLLS

SEQ ID NO: 121617 - protein, 10 aa, synthetic construct
QNWRGDLLLS

SEQ ID NO: 121618 - protein, 10 aa, synthetic construct
QNFRGDLLLS

SEQ ID NO: 121619 - protein, 10 aa, synthetic construct
QNKRGDLLLS

SEQ ID NO: 121620 - protein, 10 aa, synthetic construct
QNRRGDLLLS

SEQ ID NO: 121621 - protein, 10 aa, synthetic construct
QNHRGDLLLS

SEQ ID NO: 121622 - protein, 10 aa, synthetic construct
QNSRGDLLLS

SEQ ID NO: 121623 - protein, 10 aa, synthetic construct
QNTRGDLLLS

SEQ ID NO: 121624 - protein, 10 aa, synthetic construct
QNYRGDLLLS

SEQ ID NO: 121625 - protein, 10 aa, synthetic construct
QNNRGDLLLS

SEQ ID NO: 121626 - protein, 10 aa, synthetic construct
QNQRGDLLLS

SEQ ID NO: 121627 - protein, 10 aa, synthetic construct
QNDRGDLLLS

SEQ ID NO: 121628 - protein, 10 aa, synthetic construct
QNERGDLLLS

SEQ ID NO: 121629 - protein, 10 aa, synthetic construct
QQGRGDLLLS

SEQ ID NO: 121630 - protein, 10 aa, synthetic construct
QQARGDLLLS

SEQ ID NO: 121631 - protein, 10 aa, synthetic construct
QQVRGDLLLS

SEQ ID NO: 121632 - protein, 10 aa, synthetic construct
QQPRGDLLLS

SEQ ID NO: 121633 - protein, 10 aa, synthetic construct
QQLRGDLLLS

SEQ ID NO: 121634 - protein, 10 aa, synthetic construct
QQIRGDLLLS

SEQ ID NO: 121635 - protein, 10 aa, synthetic construct
QQMRGDLLLS

SEQ ID NO: 121636 - protein, 10 aa, synthetic construct
QQWRGDLLLS

SEQ ID NO: 121637 - protein, 10 aa, synthetic construct
QQFRGDLLLS

SEQ ID NO: 121638 - protein, 10 aa, synthetic construct
QQKRGDLLLS

SEQ ID NO: 121639 - protein, 10 aa, synthetic construct
QQRRGDLLLS

SEQ ID NO: 121640 - protein, 10 aa, synthetic construct
QQHRGDLLLS

SEQ ID NO: 121641 - protein, 10 aa, synthetic construct
QQSRGDLLLS

SEQ ID NO: 121642 - protein, 10 aa, synthetic construct
QQTRGDLLLS

SEQ ID NO: 121643 - protein, 10 aa, synthetic construct
QQYRGDLLLS

SEQ ID NO: 121644 - protein, 10 aa, synthetic construct
QQNRGDLLLS

SEQ ID NO: 121645 - protein, 10 aa, synthetic construct
QQQRGDLLLS

SEQ ID NO: 121646 - protein, 10 aa, synthetic construct
QQDRGDLLLS

SEQ ID NO: 121647 - protein, 10 aa, synthetic construct
QQERGDLLLS

SEQ ID NO: 121648 - protein, 10 aa, synthetic construct
QDGRGDLLLS

SEQ ID NO: 121649 - protein, 10 aa, synthetic construct
QDARGDLLLS

SEQ ID NO: 121650 - protein, 10 aa, synthetic construct
QDVRGDLLLS

SEQ ID NO: 121651 - protein, 10 aa, synthetic construct
QDPRGDLLLS

SEQ ID NO: 121652 - protein, 10 aa, synthetic construct
QDLRGDLLLS

SEQ ID NO: 121653 - protein, 10 aa, synthetic construct
QDIRGDLLLS

SEQ ID NO: 121654 - protein, 10 aa, synthetic construct
QDMRGDLLLS

SEQ ID NO: 121655 - protein, 10 aa, synthetic construct
QDWRGDLLLS

SEQ ID NO: 121656 - protein, 10 aa, synthetic construct
QDFRGDLLLS

SEQ ID NO: 121657 - protein, 10 aa, synthetic construct
QDKRGDLLLS

SEQ ID NO: 121658 - protein, 10 aa, synthetic construct
QDRRGDLLLS

SEQ ID NO: 121659 - protein, 10 aa, synthetic construct
QDHRGDLLLS

SEQ ID NO: 121660 - protein, 10 aa, synthetic construct
QDSRGDLLLS

SEQ ID NO: 121661 - protein, 10 aa, synthetic construct
QDTRGDLLLS

SEQ ID NO: 121662 - protein, 10 aa, synthetic construct
QDYRGDLLLS

SEQ ID NO: 121663 - protein, 10 aa, synthetic construct
QDNRGDLLLS

SEQ ID NO: 121664 - protein, 10 aa, synthetic construct
QDQRGDLLLS

SEQ ID NO: 121665 - protein, 10 aa, synthetic construct
QDDRGDLLLS

SEQ ID NO: 121666 - protein, 10 aa, synthetic construct
QDERGDLLLS

SEQ ID NO: 121667 - protein, 10 aa, synthetic construct
QEGRGDLLLS

SEQ ID NO: 121668 - protein, 10 aa, synthetic construct
QEARGDLLLS

SEQ ID NO: 121669 - protein, 10 aa, synthetic construct
QEVRGDLLLS

SEQ ID NO: 121670 - protein, 10 aa, synthetic construct
QEPRGDLLLS

SEQ ID NO: 121671 - protein, 10 aa, synthetic construct
QELRGDLLLS

SEQ ID NO: 121672 - protein, 10 aa, synthetic construct
QEIRGDLLLS

SEQ ID NO: 121673 - protein, 10 aa, synthetic construct
QEMRGDLLLS

SEQ ID NO: 121674 - protein, 10 aa, synthetic construct
QEWRGDLLLS

SEQ ID NO: 121675 - protein, 10 aa, synthetic construct
QEFRGDLLLS

SEQ ID NO: 121676 - protein, 10 aa, synthetic construct
QEKRGDLLLS

SEQ ID NO: 121677 - protein, 10 aa, synthetic construct
QERRGDLLLS

SEQ ID NO: 121678 - protein, 10 aa, synthetic construct
QEHRGDLLLS

SEQ ID NO: 121679 - protein, 10 aa, synthetic construct
QESRGDLLLS

SEQ ID NO: 121680 - protein, 10 aa, synthetic construct
QETRGDLLLS

SEQ ID NO: 121681 - protein, 10 aa, synthetic construct
QEYRGDLLLS

SEQ ID NO: 121682 - protein, 10 aa, synthetic construct
QENRGDLLLS

SEQ ID NO: 121683 - protein, 10 aa, synthetic construct
QEQRGDLLLS

SEQ ID NO: 121684 - protein, 10 aa, synthetic construct
QEDRGDLLLS

SEQ ID NO: 121685 - protein, 10 aa, synthetic construct
QEERGDLLLS

SEQ ID NO: 121686 - protein, 10 aa, synthetic construct
SGGRGDQSTL

SEQ ID NO: 121687 - protein, 10 aa, synthetic construct
SGARGDQSTL

SEQ ID NO: 121688 - protein, 10 aa, synthetic construct
SGVRGDQSTL

SEQ ID NO: 121689 - protein, 10 aa, synthetic construct
SGPRGDQSTL

SEQ ID NO: 121690 - protein, 10 aa, synthetic construct
SGLRGDQSTL

SEQ ID NO: 121691 - protein, 10 aa, synthetic construct
SGIRGDQSTL

SEQ ID NO: 121692 - protein, 10 aa, synthetic construct
SGMRGDQSTL

SEQ ID NO: 121693 - protein, 10 aa, synthetic construct
SGWRGDQSTL

SEQ ID NO: 121694 - protein, 10 aa, synthetic construct
SGFRGDQSTL

SEQ ID NO: 121695 - protein, 10 aa, synthetic construct
SGKRGDQSTL

SEQ ID NO: 121696 - protein, 10 aa, synthetic construct
SGRRGDQSTL

SEQ ID NO: 121697 - protein, 10 aa, synthetic construct
SGHRGDQSTL

SEQ ID NO: 121698 - protein, 10 aa, synthetic construct
SGSRGDQSTL

SEQ ID NO: 121699 - protein, 10 aa, synthetic construct
SGTRGDQSTL

SEQ ID NO: 121700 - protein, 10 aa, synthetic construct
SGYRGDQSTL

SEQ ID NO: 121701 - protein, 10 aa, synthetic construct
SGNRGDQSTL

SEQ ID NO: 121702 - protein, 10 aa, synthetic construct
SGQRGDQSTL

SEQ ID NO: 121703 - protein, 10 aa, synthetic construct
SGDRGDQSTL

SEQ ID NO: 121704 - protein, 10 aa, synthetic construct
SGERGDQSTL

SEQ ID NO: 121705 - protein, 10 aa, synthetic construct
SAGRGDQSTL

SEQ ID NO: 121706 - protein, 10 aa, synthetic construct
SAARGDQSTL

SEQ ID NO: 121707 - protein, 10 aa, synthetic construct
SAVRGDQSTL

SEQ ID NO: 121708 - protein, 10 aa, synthetic construct
SAPRGDQSTL

SEQ ID NO: 121709 - protein, 10 aa, synthetic construct
SALRGDQSTL

SEQ ID NO: 121710 - protein, 10 aa, synthetic construct
SAIRGDQSTL

SEQ ID NO: 121711 - protein, 10 aa, synthetic construct
SAMRGDQSTL

SEQ ID NO: 121712 - protein, 10 aa, synthetic construct
SAWRGDQSTL

SEQ ID NO: 121713 - protein, 10 aa, synthetic construct
SAFRGDQSTL

SEQ ID NO: 121714 - protein, 10 aa, synthetic construct
SAKRGDQSTL

SEQ ID NO: 121715 - protein, 10 aa, synthetic construct
SARRGDQSTL

SEQ ID NO: 121716 - protein, 10 aa, synthetic construct
SAHRGDQSTL

SEQ ID NO: 121717 - protein, 10 aa, synthetic construct
SASRGDQSTL

SEQ ID NO: 121718 - protein, 10 aa, synthetic construct
SATRGDQSTL

SEQ ID NO: 121719 - protein, 10 aa, synthetic construct
SAYRGDQSTL

SEQ ID NO: 121720 - protein, 10 aa, synthetic construct
SANRGDQSTL

SEQ ID NO: 121721 - protein, 10 aa, synthetic construct
SAQRGDQSTL

SEQ ID NO: 121722 - protein, 10 aa, synthetic construct
SADRGDQSTL

SEQ ID NO: 121723 - protein, 10 aa, synthetic construct
SAERGDQSTL

SEQ ID NO: 121724 - protein, 10 aa, synthetic construct
SVGRGDQSTL

SEQ ID NO: 121725 - protein, 10 aa, synthetic construct
SVARGDQSTL

SEQ ID NO: 121726 - protein, 10 aa, synthetic construct
SVVRGDQSTL

SEQ ID NO: 121727 - protein, 10 aa, synthetic construct
SVPRGDQSTL

SEQ ID NO: 121728 - protein, 10 aa, synthetic construct
SVLRGDQSTL

SEQ ID NO: 121729 - protein, 10 aa, synthetic construct
SVIRGDQSTL

SEQ ID NO: 121730 - protein, 10 aa, synthetic construct
SVMRGDQSTL

SEQ ID NO: 121731 - protein, 10 aa, synthetic construct
SVWRGDQSTL

SEQ ID NO: 121732 - protein, 10 aa, synthetic construct
SVFRGDQSTL

SEQ ID NO: 121733 - protein, 10 aa, synthetic construct
SVKRGDQSTL

SEQ ID NO: 121734 - protein, 10 aa, synthetic construct
SVRRGDQSTL

SEQ ID NO: 121735 - protein, 10 aa, synthetic construct
SVHRGDQSTL

SEQ ID NO: 121736 - protein, 10 aa, synthetic construct
SVSRGDQSTL

SEQ ID NO: 121737 - protein, 10 aa, synthetic construct
SVTRGDQSTL

SEQ ID NO: 121738 - protein, 10 aa, synthetic construct
SVYRGDQSTL

SEQ ID NO: 121739 - protein, 10 aa, synthetic construct
SVNRGDQSTL

SEQ ID NO: 121740 - protein, 10 aa, synthetic construct
SVQRGDQSTL

SEQ ID NO: 121741 - protein, 10 aa, synthetic construct
SVDRGDQSTL

SEQ ID NO: 121742 - protein, 10 aa, synthetic construct
SVERGDQSTL

SEQ ID NO: 121743 - protein, 10 aa, synthetic construct
SPGRGDQSTL

SEQ ID NO: 121744 - protein, 10 aa, synthetic construct
SPARGDQSTL

SEQ ID NO: 121745 - protein, 10 aa, synthetic construct
SPVRGDQSTL

SEQ ID NO: 121746 - protein, 10 aa, synthetic construct
SPPRGDQSTL

SEQ ID NO: 121747 - protein, 10 aa, synthetic construct
SPLRGDQSTL

SEQ ID NO: 121748 - protein, 10 aa, synthetic construct
SPIRGDQSTL

SEQ ID NO: 121749 - protein, 10 aa, synthetic construct
SPMRGDQSTL

SEQ ID NO: 121750 - protein, 10 aa, synthetic construct
SPWRGDQSTL

SEQ ID NO: 121751 - protein, 10 aa, synthetic construct
SPFRGDQSTL

SEQ ID NO: 121752 - protein, 10 aa, synthetic construct
SPKRGDQSTL

SEQ ID NO: 121753 - protein, 10 aa, synthetic construct
SPRRGDQSTL

SEQ ID NO: 121754 - protein, 10 aa, synthetic construct
SPHRGDQSTL

SEQ ID NO: 121755 - protein, 10 aa, synthetic construct
SPSRGDQSTL

SEQ ID NO: 121756 - protein, 10 aa, synthetic construct
SPTRGDQSTL

SEQ ID NO: 121757 - protein, 10 aa, synthetic construct
SPYRGDQSTL

SEQ ID NO: 121758 - protein, 10 aa, synthetic construct
SPNRGDQSTL

SEQ ID NO: 121759 - protein, 10 aa, synthetic construct
SPQRGDQSTL

SEQ ID NO: 121760 - protein, 10 aa, synthetic construct
SPDRGDQSTL

SEQ ID NO: 121761 - protein, 10 aa, synthetic construct
SPERGDQSTL

SEQ ID NO: 121762 - protein, 10 aa, synthetic construct
SLGRGDQSTL

SEQ ID NO: 121763 - protein, 10 aa, synthetic construct
SLARGDQSTL

SEQ ID NO: 121764 - protein, 10 aa, synthetic construct
SLVRGDQSTL

SEQ ID NO: 121765 - protein, 10 aa, synthetic construct
SLPRGDQSTL

SEQ ID NO: 121766 - protein, 10 aa, synthetic construct
SLLRGDQSTL

SEQ ID NO: 121767 - protein, 10 aa, synthetic construct
SLIRGDQSTL

SEQ ID NO: 121768 - protein, 10 aa, synthetic construct
SLMRGDQSTL

SEQ ID NO: 121769 - protein, 10 aa, synthetic construct
SLWRGDQSTL

SEQ ID NO: 121770 - protein, 10 aa, synthetic construct
SLFRGDQSTL

SEQ ID NO: 121771 - protein, 10 aa, synthetic construct
SLKRGDQSTL

SEQ ID NO: 121772 - protein, 10 aa, synthetic construct
SLRRGDQSTL

SEQ ID NO: 121773 - protein, 10 aa, synthetic construct
SLHRGDQSTL

SEQ ID NO: 121774 - protein, 10 aa, synthetic construct
SLSRGDQSTL

SEQ ID NO: 121775 - protein, 10 aa, synthetic construct
SLTRGDQSTL

SEQ ID NO: 121776 - protein, 10 aa, synthetic construct
SLYRGDQSTL

SEQ ID NO: 121777 - protein, 10 aa, synthetic construct
SLNRGDQSTL

SEQ ID NO: 121778 - protein, 10 aa, synthetic construct
SLQRGDQSTL

SEQ ID NO: 121779 - protein, 10 aa, synthetic construct
SLDRGDQSTL

SEQ ID NO: 121780 - protein, 10 aa, synthetic construct
SLERGDQSTL

SEQ ID NO: 121781 - protein, 10 aa, synthetic construct
SIGRGDQSTL

SEQ ID NO: 121782 - protein, 10 aa, synthetic construct
SIARGDQSTL

SEQ ID NO: 121783 - protein, 10 aa, synthetic construct
SIVRGDQSTL

SEQ ID NO: 121784 - protein, 10 aa, synthetic construct
SIPRGDQSTL

SEQ ID NO: 121785 - protein, 10 aa, synthetic construct
SILRGDQSTL

SEQ ID NO: 121786 - protein, 10 aa, synthetic construct
SIIRGDQSTL

SEQ ID NO: 121787 - protein, 10 aa, synthetic construct
SIMRGDQSTL

SEQ ID NO: 121788 - protein, 10 aa, synthetic construct
SIWRGDQSTL

SEQ ID NO: 121789 - protein, 10 aa, synthetic construct
SIFRGDQSTL

SEQ ID NO: 121790 - protein, 10 aa, synthetic construct
SIKRGDQSTL

SEQ ID NO: 121791 - protein, 10 aa, synthetic construct
SIRRGDQSTL

SEQ ID NO: 121792 - protein, 10 aa, synthetic construct
SIHRGDQSTL

SEQ ID NO: 121793 - protein, 10 aa, synthetic construct
SISRGDQSTL

SEQ ID NO: 121794 - protein, 10 aa, synthetic construct
SITRGDQSTL

SEQ ID NO: 121795 - protein, 10 aa, synthetic construct
SIYRGDQSTL

SEQ ID NO: 121796 - protein, 10 aa, synthetic construct
SINRGDQSTL

SEQ ID NO: 121797 - protein, 10 aa, synthetic construct
SIQRGDQSTL

SEQ ID NO: 121798 - protein, 10 aa, synthetic construct
SIDRGDQSTL

SEQ ID NO: 121799 - protein, 10 aa, synthetic construct
SIERGDQSTL

SEQ ID NO: 121800 - protein, 10 aa, synthetic construct
SMGRGDQSTL

SEQ ID NO: 121801 - protein, 10 aa, synthetic construct
SMARGDQSTL

SEQ ID NO: 121802 - protein, 10 aa, synthetic construct
SMVRGDQSTL

SEQ ID NO: 121803 - protein, 10 aa, synthetic construct
SMPRGDQSTL

SEQ ID NO: 121804 - protein, 10 aa, synthetic construct
SMLRGDQSTL

SEQ ID NO: 121805 - protein, 10 aa, synthetic construct
SMIRGDQSTL

SEQ ID NO: 121806 - protein, 10 aa, synthetic construct
SMMRGDQSTL

SEQ ID NO: 121807 - protein, 10 aa, synthetic construct
SMWRGDQSTL

SEQ ID NO: 121808 - protein, 10 aa, synthetic construct
SMFRGDQSTL

SEQ ID NO: 121809 - protein, 10 aa, synthetic construct
SMKRGDQSTL

SEQ ID NO: 121810 - protein, 10 aa, synthetic construct
SMRRGDQSTL

SEQ ID NO: 121811 - protein, 10 aa, synthetic construct
SMHRGDQSTL

SEQ ID NO: 121812 - protein, 10 aa, synthetic construct
SMSRGDQSTL

SEQ ID NO: 121813 - protein, 10 aa, synthetic construct
SMTRGDQSTL

SEQ ID NO: 121814 - protein, 10 aa, synthetic construct
SMYRGDQSTL

SEQ ID NO: 121815 - protein, 10 aa, synthetic construct
SMNRGDQSTL

SEQ ID NO: 121816 - protein, 10 aa, synthetic construct
SMQRGDQSTL

SEQ ID NO: 121817 - protein, 10 aa, synthetic construct
SMDRGDQSTL

SEQ ID NO: 121818 - protein, 10 aa, synthetic construct
SMERGDQSTL

SEQ ID NO: 121819 - protein, 10 aa, synthetic construct
SWGRGDQSTL

SEQ ID NO: 121820 - protein, 10 aa, synthetic construct
SWARGDQSTL

SEQ ID NO: 121821 - protein, 10 aa, synthetic construct
SWVRGDQSTL

SEQ ID NO: 121822 - protein, 10 aa, synthetic construct
SWPRGDQSTL

SEQ ID NO: 121823 - protein, 10 aa, synthetic construct
SWLRGDQSTL

SEQ ID NO: 121824 - protein, 10 aa, synthetic construct
SWIRGDQSTL

SEQ ID NO: 121825 - protein, 10 aa, synthetic construct
SWMRGDQSTL

SEQ ID NO: 121826 - protein, 10 aa, synthetic construct
SWWRGDQSTL

SEQ ID NO: 121827 - protein, 10 aa, synthetic construct
SWFRGDQSTL

SEQ ID NO: 121828 - protein, 10 aa, synthetic construct
SWKRGDQSTL

SEQ ID NO: 121829 - protein, 10 aa, synthetic construct
SWRRGDQSTL

SEQ ID NO: 121830 - protein, 10 aa, synthetic construct
SWHRGDQSTL

SEQ ID NO: 121831 - protein, 10 aa, synthetic construct
SWSRGDQSTL

SEQ ID NO: 121832 - protein, 10 aa, synthetic construct
SWTRGDQSTL

SEQ ID NO: 121833 - protein, 10 aa, synthetic construct
SWYRGDQSTL

SEQ ID NO: 121834 - protein, 10 aa, synthetic construct
SWNRGDQSTL

SEQ ID NO: 121835 - protein, 10 aa, synthetic construct
SWQRGDQSTL

SEQ ID NO: 121836 - protein, 10 aa, synthetic construct
SWDRGDQSTL

SEQ ID NO: 121837 - protein, 10 aa, synthetic construct
SWERGDQSTL

SEQ ID NO: 121838 - protein, 10 aa, synthetic construct
SFGRGDQSTL

SEQ ID NO: 121839 - protein, 10 aa, synthetic construct
SFARGDQSTL

SEQ ID NO: 121840 - protein, 10 aa, synthetic construct
SFVRGDQSTL

SEQ ID NO: 121841 - protein, 10 aa, synthetic construct
SFPRGDQSTL

SEQ ID NO: 121842 - protein, 10 aa, synthetic construct
SFLRGDQSTL

SEQ ID NO: 121843 - protein, 10 aa, synthetic construct
SFIRGDQSTL

SEQ ID NO: 121844 - protein, 10 aa, synthetic construct
SFMRGDQSTL

SEQ ID NO: 121845 - protein, 10 aa, synthetic construct
SFWRGDQSTL

SEQ ID NO: 121846 - protein, 10 aa, synthetic construct
SFFRGDQSTL

SEQ ID NO: 121847 - protein, 10 aa, synthetic construct
SFKRGDQSTL

SEQ ID NO: 121848 - protein, 10 aa, synthetic construct
SFRRGDQSTL

SEQ ID NO: 121849 - protein, 10 aa, synthetic construct
SFHRGDQSTL

SEQ ID NO: 121850 - protein, 10 aa, synthetic construct
SFSRGDQSTL

SEQ ID NO: 121851 - protein, 10 aa, synthetic construct
SFTRGDQSTL

SEQ ID NO: 121852 - protein, 10 aa, synthetic construct
SFYRGDQSTL

SEQ ID NO: 121853 - protein, 10 aa, synthetic construct
SFNRGDQSTL

SEQ ID NO: 121854 - protein, 10 aa, synthetic construct
SFQRGDQSTL

SEQ ID NO: 121855 - protein, 10 aa, synthetic construct
SFDRGDQSTL

SEQ ID NO: 121856 - protein, 10 aa, synthetic construct
SFERGDQSTL

SEQ ID NO: 121857 - protein, 10 aa, synthetic construct
SKGRGDQSTL

SEQ ID NO: 121858 - protein, 10 aa, synthetic construct
SKARGDQSTL

SEQ ID NO: 121859 - protein, 10 aa, synthetic construct
SKVRGDQSTL

SEQ ID NO: 121860 - protein, 10 aa, synthetic construct
SKPRGDQSTL

SEQ ID NO: 121861 - protein, 10 aa, synthetic construct
SKLRGDQSTL

SEQ ID NO: 121862 - protein, 10 aa, synthetic construct
SKIRGDQSTL

SEQ ID NO: 121863 - protein, 10 aa, synthetic construct
SKMRGDQSTL

SEQ ID NO: 121864 - protein, 10 aa, synthetic construct
SKWRGDQSTL

SEQ ID NO: 121865 - protein, 10 aa, synthetic construct
SKFRGDQSTL

SEQ ID NO: 121866 - protein, 10 aa, synthetic construct
SKKRGDQSTL

SEQ ID NO: 121867 - protein, 10 aa, synthetic construct
SKRRGDQSTL

SEQ ID NO: 121868 - protein, 10 aa, synthetic construct
SKHRGDQSTL

SEQ ID NO: 121869 - protein, 10 aa, synthetic construct
SKSRGDQSTL

SEQ ID NO: 121870 - protein, 10 aa, synthetic construct
SKTRGDQSTL

SEQ ID NO: 121871 - protein, 10 aa, synthetic construct
SKYRGDQSTL

SEQ ID NO: 121872 - protein, 10 aa, synthetic construct
SKNRGDQSTL

SEQ ID NO: 121873 - protein, 10 aa, synthetic construct
SKQRGDQSTL

SEQ ID NO: 121874 - protein, 10 aa, synthetic construct
SKDRGDQSTL

SEQ ID NO: 121875 - protein, 10 aa, synthetic construct
SKERGDQSTL

SEQ ID NO: 121876 - protein, 10 aa, synthetic construct
SRGRGDQSTL

SEQ ID NO: 121877 - protein, 10 aa, synthetic construct
SRARGDQSTL

SEQ ID NO: 121878 - protein, 10 aa, synthetic construct
SRVRGDQSTL

SEQ ID NO: 121879 - protein, 10 aa, synthetic construct
SRPRGDQSTL

SEQ ID NO: 121880 - protein, 10 aa, synthetic construct
SRLRGDQSTL

SEQ ID NO: 121881 - protein, 10 aa, synthetic construct
SRIRGDQSTL

SEQ ID NO: 121882 - protein, 10 aa, synthetic construct
SRMRGDQSTL

SEQ ID NO: 121883 - protein, 10 aa, synthetic construct
SRWRGDQSTL

SEQ ID NO: 121884 - protein, 10 aa, synthetic construct
SRFRGDQSTL

SEQ ID NO: 121885 - protein, 10 aa, synthetic construct
SRKRGDQSTL

SEQ ID NO: 121886 - protein, 10 aa, synthetic construct
SRRRGDQSTL

SEQ ID NO: 121887 - protein, 10 aa, synthetic construct
SRHRGDQSTL

SEQ ID NO: 121888 - protein, 10 aa, synthetic construct
SRSRGDQSTL

SEQ ID NO: 121889 - protein, 10 aa, synthetic construct
SRTRGDQSTL

SEQ ID NO: 121890 - protein, 10 aa, synthetic construct
SRYRGDQSTL

SEQ ID NO: 121891 - protein, 10 aa, synthetic construct
SRNRGDQSTL

SEQ ID NO: 121892 - protein, 10 aa, synthetic construct
SRQRGDQSTL

SEQ ID NO: 121893 - protein, 10 aa, synthetic construct
SRDRGDQSTL

SEQ ID NO: 121894 - protein, 10 aa, synthetic construct
SRERGDQSTL

SEQ ID NO: 121895 - protein, 10 aa, synthetic construct
SHGRGDQSTL

SEQ ID NO: 121896 - protein, 10 aa, synthetic construct
SHARGDQSTL

SEQ ID NO: 121897 - protein, 10 aa, synthetic construct
SHVRGDQSTL

SEQ ID NO: 121898 - protein, 10 aa, synthetic construct
SHPRGDQSTL

SEQ ID NO: 121899 - protein, 10 aa, synthetic construct
SHLRGDQSTL

SEQ ID NO: 121900 - protein, 10 aa, synthetic construct
SHIRGDQSTL

SEQ ID NO: 121901 - protein, 10 aa, synthetic construct
SHMRGDQSTL

SEQ ID NO: 121902 - protein, 10 aa, synthetic construct
SHWRGDQSTL

SEQ ID NO: 121903 - protein, 10 aa, synthetic construct
SHFRGDQSTL

SEQ ID NO: 121904 - protein, 10 aa, synthetic construct
SHKRGDQSTL

SEQ ID NO: 121905 - protein, 10 aa, synthetic construct
SHRRGDQSTL

SEQ ID NO: 121906 - protein, 10 aa, synthetic construct
SHHRGDQSTL

SEQ ID NO: 121907 - protein, 10 aa, synthetic construct
SHSRGDQSTL

SEQ ID NO: 121908 - protein, 10 aa, synthetic construct
SHTRGDQSTL

SEQ ID NO: 121909 - protein, 10 aa, synthetic construct
SHYRGDQSTL

SEQ ID NO: 121910 - protein, 10 aa, synthetic construct
SHNRGDQSTL

SEQ ID NO: 121911 - protein, 10 aa, synthetic construct
SHQRGDQSTL

SEQ ID NO: 121912 - protein, 10 aa, synthetic construct
SHDRGDQSTL

SEQ ID NO: 121913 - protein, 10 aa, synthetic construct
SHERGDQSTL

SEQ ID NO: 121914 - protein, 10 aa, synthetic construct
SSGRGDQSTL

SEQ ID NO: 121915 - protein, 10 aa, synthetic construct
SSARGDQSTL

SEQ ID NO: 121916 - protein, 10 aa, synthetic construct
SSVRGDQSTL

SEQ ID NO: 121917 - protein, 10 aa, synthetic construct
SSPRGDQSTL

SEQ ID NO: 121918 - protein, 10 aa, synthetic construct
SSLRGDQSTL

SEQ ID NO: 121919 - protein, 10 aa, synthetic construct
SSIRGDQSTL

SEQ ID NO: 121920 - protein, 10 aa, synthetic construct
SSMRGDQSTL

SEQ ID NO: 121921 - protein, 10 aa, synthetic construct
SSWRGDQSTL

SEQ ID NO: 121922 - protein, 10 aa, synthetic construct
SSFRGDQSTL

SEQ ID NO: 121923 - protein, 10 aa, synthetic construct
SSKRGDQSTL

SEQ ID NO: 121924 - protein, 10 aa, synthetic construct
SSRRGDQSTL

SEQ ID NO: 121925 - protein, 10 aa, synthetic construct
SSHRGDQSTL

SEQ ID NO: 121926 - protein, 10 aa, synthetic construct
SSSRGDQSTL

SEQ ID NO: 121927 - protein, 10 aa, synthetic construct
SSTRGDQSTL

SEQ ID NO: 121928 - protein, 10 aa, synthetic construct
SSYRGDQSTL

SEQ ID NO: 121929 - protein, 10 aa, synthetic construct
SSNRGDQSTL

SEQ ID NO: 121930 - protein, 10 aa, synthetic construct
SSQRGDQSTL

SEQ ID NO: 121931 - protein, 10 aa, synthetic construct
SSDRGDQSTL

SEQ ID NO: 121932 - protein, 10 aa, synthetic construct
SSERGDQSTL

SEQ ID NO: 121933 - protein, 10 aa, synthetic construct
STGRGDQSTL

SEQ ID NO: 121934 - protein, 10 aa, synthetic construct
STARGDQSTL

SEQ ID NO: 121935 - protein, 10 aa, synthetic construct
STVRGDQSTL

SEQ ID NO: 121936 - protein, 10 aa, synthetic construct
STPRGDQSTL

SEQ ID NO: 121937 - protein, 10 aa, synthetic construct
STLRGDQSTL

SEQ ID NO: 121938 - protein, 10 aa, synthetic construct
STIRGDQSTL

SEQ ID NO: 121939 - protein, 10 aa, synthetic construct
STMRGDQSTL

SEQ ID NO: 121940 - protein, 10 aa, synthetic construct
STWRGDQSTL

SEQ ID NO: 121941 - protein, 10 aa, synthetic construct
STFRGDQSTL

SEQ ID NO: 121942 - protein, 10 aa, synthetic construct
STKRGDQSTL

SEQ ID NO: 121943 - protein, 10 aa, synthetic construct
STRRGDQSTL

SEQ ID NO: 121944 - protein, 10 aa, synthetic construct
STHRGDQSTL

SEQ ID NO: 121945 - protein, 10 aa, synthetic construct
STSRGDQSTL

SEQ ID NO: 121946 - protein, 10 aa, synthetic construct
STTRGDQSTL

SEQ ID NO: 121947 - protein, 10 aa, synthetic construct
STYRGDQSTL

SEQ ID NO: 121948 - protein, 10 aa, synthetic construct
STNRGDQSTL

SEQ ID NO: 121949 - protein, 10 aa, synthetic construct
STQRGDQSTL

SEQ ID NO: 121950 - protein, 10 aa, synthetic construct
STDRGDQSTL

SEQ ID NO: 121951 - protein, 10 aa, synthetic construct
STERGDQSTL

SEQ ID NO: 121952 - protein, 10 aa, synthetic construct
SYGRGDQSTL

SEQ ID NO: 121953 - protein, 10 aa, synthetic construct
SYARGDQSTL

SEQ ID NO: 121954 - protein, 10 aa, synthetic construct
SYVRGDQSTL

SEQ ID NO: 121955 - protein, 10 aa, synthetic construct
SYPRGDQSTL

SEQ ID NO: 121956 - protein, 10 aa, synthetic construct
SYLRGDQSTL

SEQ ID NO: 121957 - protein, 10 aa, synthetic construct
SYIRGDQSTL

SEQ ID NO: 121958 - protein, 10 aa, synthetic construct
SYMRGDQSTL

SEQ ID NO: 121959 - protein, 10 aa, synthetic construct
SYWRGDQSTL

SEQ ID NO: 121960 - protein, 10 aa, synthetic construct
SYFRGDQSTL

SEQ ID NO: 121961 - protein, 10 aa, synthetic construct
SYKRGDQSTL

SEQ ID NO: 121962 - protein, 10 aa, synthetic construct
SYRRGDQSTL

SEQ ID NO: 121963 - protein, 10 aa, synthetic construct
SYHRGDQSTL

SEQ ID NO: 121964 - protein, 10 aa, synthetic construct
SYSRGDQSTL

SEQ ID NO: 121965 - protein, 10 aa, synthetic construct
SYTRGDQSTL

SEQ ID NO: 121966 - protein, 10 aa, synthetic construct
SYYRGDQSTL

SEQ ID NO: 121967 - protein, 10 aa, synthetic construct
SYNRGDQSTL

SEQ ID NO: 121968 - protein, 10 aa, synthetic construct
SYQRGDQSTL

SEQ ID NO: 121969 - protein, 10 aa, synthetic construct
SYDRGDQSTL

SEQ ID NO: 121970 - protein, 10 aa, synthetic construct
SYERGDQSTL

SEQ ID NO: 121971 - protein, 10 aa, synthetic construct
SNGRGDQSTL

SEQ ID NO: 121972 - protein, 10 aa, synthetic construct
SNARGDQSTL

SEQ ID NO: 121973 - protein, 10 aa, synthetic construct
SNVRGDQSTL

SEQ ID NO: 121974 - protein, 10 aa, synthetic construct
SNPRGDQSTL

SEQ ID NO: 121975 - protein, 10 aa, synthetic construct
SNLRGDQSTL

SEQ ID NO: 121976 - protein, 10 aa, synthetic construct
SNIRGDQSTL

SEQ ID NO: 121977 - protein, 10 aa, synthetic construct
SNMRGDQSTL

SEQ ID NO: 121978 - protein, 10 aa, synthetic construct
SNWRGDQSTL

SEQ ID NO: 121979 - protein, 10 aa, synthetic construct
SNFRGDQSTL

SEQ ID NO: 121980 - protein, 10 aa, synthetic construct
SNKRGDQSTL

SEQ ID NO: 121981 - protein, 10 aa, synthetic construct
SNRRGDQSTL

SEQ ID NO: 121982 - protein, 10 aa, synthetic construct
SNHRGDQSTL

SEQ ID NO: 121983 - protein, 10 aa, synthetic construct
SNSRGDQSTL

SEQ ID NO: 121984 - protein, 10 aa, synthetic construct
SNTRGDQSTL

SEQ ID NO: 121985 - protein, 10 aa, synthetic construct
SNYRGDQSTL

SEQ ID NO: 121986 - protein, 10 aa, synthetic construct
SNNRGDQSTL

SEQ ID NO: 121987 - protein, 10 aa, synthetic construct
SNQRGDQSTL

SEQ ID NO: 121988 - protein, 10 aa, synthetic construct
SNDRGDQSTL

SEQ ID NO: 121989 - protein, 10 aa, synthetic construct
SNERGDQSTL

SEQ ID NO: 121990 - protein, 10 aa, synthetic construct
SQGRGDQSTL

SEQ ID NO: 121991 - protein, 10 aa, synthetic construct
SQARGDQSTL

SEQ ID NO: 121992 - protein, 10 aa, synthetic construct
SQVRGDQSTL

SEQ ID NO: 121993 - protein, 10 aa, synthetic construct
SQPRGDQSTL

SEQ ID NO: 121994 - protein, 10 aa, synthetic construct
SQLRGDQSTL

SEQ ID NO: 121995 - protein, 10 aa, synthetic construct
SQIRGDQSTL

SEQ ID NO: 121996 - protein, 10 aa, synthetic construct
SQMRGDQSTL

SEQ ID NO: 121997 - protein, 10 aa, synthetic construct
SQWRGDQSTL

SEQ ID NO: 121998 - protein, 10 aa, synthetic construct
SQFRGDQSTL

SEQ ID NO: 121999 - protein, 10 aa, synthetic construct
SQKRGDQSTL

SEQ ID NO: 122000 - protein, 10 aa, synthetic construct
SQRRGDQSTL

SEQ ID NO: 122001 - protein, 10 aa, synthetic construct
SQHRGDQSTL

SEQ ID NO: 122002 - protein, 10 aa, synthetic construct
SQSRGDQSTL

SEQ ID NO: 122003 - protein, 10 aa, synthetic construct
SQTRGDQSTL

SEQ ID NO: 122004 - protein, 10 aa, synthetic construct
SQYRGDQSTL

SEQ ID NO: 122005 - protein, 10 aa, synthetic construct
SQNRGDQSTL

SEQ ID NO: 122006 - protein, 10 aa, synthetic construct
SQQRGDQSTL

SEQ ID NO: 122007 - protein, 10 aa, synthetic construct
SQDRGDQSTL

SEQ ID NO: 122008 - protein, 10 aa, synthetic construct
SQERGDQSTL

SEQ ID NO: 122009 - protein, 10 aa, synthetic construct
SDGRGDQSTL

SEQ ID NO: 122010 - protein, 10 aa, synthetic construct
SDARGDQSTL

SEQ ID NO: 122011 - protein, 10 aa, synthetic construct
SDVRGDQSTL

SEQ ID NO: 122012 - protein, 10 aa, synthetic construct
SDPRGDQSTL

SEQ ID NO: 122013 - protein, 10 aa, synthetic construct
SDLRGDQSTL

SEQ ID NO: 122014 - protein, 10 aa, synthetic construct
SDIRGDQSTL

SEQ ID NO: 122015 - protein, 10 aa, synthetic construct
SDMRGDQSTL

SEQ ID NO: 122016 - protein, 10 aa, synthetic construct
SDWRGDQSTL

SEQ ID NO: 122017 - protein, 10 aa, synthetic construct
SDFRGDQSTL

SEQ ID NO: 122018 - protein, 10 aa, synthetic construct
SDKRGDQSTL

SEQ ID NO: 122019 - protein, 10 aa, synthetic construct
SDRRGDQSTL

SEQ ID NO: 122020 - protein, 10 aa, synthetic construct
SDHRGDQSTL

SEQ ID NO: 122021 - protein, 10 aa, synthetic construct
SDSRGDQSTL

SEQ ID NO: 122022 - protein, 10 aa, synthetic construct
SDTRGDQSTL

SEQ ID NO: 122023 - protein, 10 aa, synthetic construct
SDYRGDQSTL

SEQ ID NO: 122024 - protein, 10 aa, synthetic construct
SDNRGDQSTL

SEQ ID NO: 122025 - protein, 10 aa, synthetic construct
SDQRGDQSTL

SEQ ID NO: 122026 - protein, 10 aa, synthetic construct
SDDRGDQSTL

SEQ ID NO: 122027 - protein, 10 aa, synthetic construct
SDERGDQSTL

SEQ ID NO: 122028 - protein, 10 aa, synthetic construct
SEGRGDQSTL

SEQ ID NO: 122029 - protein, 10 aa, synthetic construct
SEARGDQSTL

SEQ ID NO: 122030 - protein, 10 aa, synthetic construct
SEVRGDQSTL

SEQ ID NO: 122031 - protein, 10 aa, synthetic construct
SEPRGDQSTL

SEQ ID NO: 122032 - protein, 10 aa, synthetic construct
SELRGDQSTL

SEQ ID NO: 122033 - protein, 10 aa, synthetic construct
SEIRGDQSTL

SEQ ID NO: 122034 - protein, 10 aa, synthetic construct
SEMRGDQSTL

SEQ ID NO: 122035 - protein, 10 aa, synthetic construct
SEWRGDQSTL

SEQ ID NO: 122036 - protein, 10 aa, synthetic construct
SEFRGDQSTL

SEQ ID NO: 122037 - protein, 10 aa, synthetic construct
SEKRGDQSTL

SEQ ID NO: 122038 - protein, 10 aa, synthetic construct
SERRGDQSTL

SEQ ID NO: 122039 - protein, 10 aa, synthetic construct
SEHRGDQSTL

SEQ ID NO: 122040 - protein, 10 aa, synthetic construct
SESRGDQSTL

SEQ ID NO: 122041 - protein, 10 aa, synthetic construct
SETRGDQSTL

SEQ ID NO: 122042 - protein, 10 aa, synthetic construct
SEYRGDQSTL

SEQ ID NO: 122043 - protein, 10 aa, synthetic construct
SENRGDQSTL

SEQ ID NO: 122044 - protein, 10 aa, synthetic construct
SEQRGDQSTL

SEQ ID NO: 122045 - protein, 10 aa, synthetic construct
SEDRGDQSTL

SEQ ID NO: 122046 - protein, 10 aa, synthetic construct
SEERGDQSTL

SEQ ID NO: 122047 - protein, 10 aa, synthetic construct
TGGRGDQSTL

SEQ ID NO: 122048 - protein, 10 aa, synthetic construct
TGARGDQSTL

SEQ ID NO: 122049 - protein, 10 aa, synthetic construct
TGVRGDQSTL

SEQ ID NO: 122050 - protein, 10 aa, synthetic construct
TGPRGDQSTL

SEQ ID NO: 122051 - protein, 10 aa, synthetic construct
TGLRGDQSTL

SEQ ID NO: 122052 - protein, 10 aa, synthetic construct
TGIRGDQSTL

SEQ ID NO: 122053 - protein, 10 aa, synthetic construct
TGMRGDQSTL

SEQ ID NO: 122054 - protein, 10 aa, synthetic construct
TGWRGDQSTL

SEQ ID NO: 122055 - protein, 10 aa, synthetic construct
TGFRGDQSTL

SEQ ID NO: 122056 - protein, 10 aa, synthetic construct
TGKRGDQSTL

SEQ ID NO: 122057 - protein, 10 aa, synthetic construct
TGRRGDQSTL

SEQ ID NO: 122058 - protein, 10 aa, synthetic construct
TGHRGDQSTL

SEQ ID NO: 122059 - protein, 10 aa, synthetic construct
TGSRGDQSTL

SEQ ID NO: 122060 - protein, 10 aa, synthetic construct
TGTRGDQSTL

SEQ ID NO: 122061 - protein, 10 aa, synthetic construct
TGYRGDQSTL

SEQ ID NO: 122062 - protein, 10 aa, synthetic construct
TGNRGDQSTL

SEQ ID NO: 122063 - protein, 10 aa, synthetic construct
TGQRGDQSTL

SEQ ID NO: 122064 - protein, 10 aa, synthetic construct
TGDRGDQSTL

SEQ ID NO: 122065 - protein, 10 aa, synthetic construct
TGERGDQSTL

SEQ ID NO: 122066 - protein, 10 aa, synthetic construct
TAGRGDQSTL

SEQ ID NO: 122067 - protein, 10 aa, synthetic construct
TAARGDQSTL

SEQ ID NO: 122068 - protein, 10 aa, synthetic construct
TAVRGDQSTL

SEQ ID NO: 122069 - protein, 10 aa, synthetic construct
TAPRGDQSTL

SEQ ID NO: 122070 - protein, 10 aa, synthetic construct
TALRGDQSTL

SEQ ID NO: 122071 - protein, 10 aa, synthetic construct
TAIRGDQSTL

SEQ ID NO: 122072 - protein, 10 aa, synthetic construct
TAMRGDQSTL

SEQ ID NO: 122073 - protein, 10 aa, synthetic construct
TAWRGDQSTL

SEQ ID NO: 122074 - protein, 10 aa, synthetic construct
TAFRGDQSTL

SEQ ID NO: 122075 - protein, 10 aa, synthetic construct
TAKRGDQSTL

SEQ ID NO: 122076 - protein, 10 aa, synthetic construct
TARRGDQSTL

SEQ ID NO: 122077 - protein, 10 aa, synthetic construct
TAHRGDQSTL

SEQ ID NO: 122078 - protein, 10 aa, synthetic construct
TASRGDQSTL

SEQ ID NO: 122079 - protein, 10 aa, synthetic construct
TATRGDQSTL

SEQ ID NO: 122080 - protein, 10 aa, synthetic construct
TAYRGDQSTL

SEQ ID NO: 122081 - protein, 10 aa, synthetic construct
TANRGDQSTL

SEQ ID NO: 122082 - protein, 10 aa, synthetic construct
TAQRGDQSTL

SEQ ID NO: 122083 - protein, 10 aa, synthetic construct
TADRGDQSTL

SEQ ID NO: 122084 - protein, 10 aa, synthetic construct
TAERGDQSTL

SEQ ID NO: 122085 - protein, 10 aa, synthetic construct
TVGRGDQSTL

SEQ ID NO: 122086 - protein, 10 aa, synthetic construct
TVARGDQSTL

SEQ ID NO: 122087 - protein, 10 aa, synthetic construct
TVVRGDQSTL

SEQ ID NO: 122088 - protein, 10 aa, synthetic construct
TVPRGDQSTL

SEQ ID NO: 122089 - protein, 10 aa, synthetic construct
TVLRGDQSTL

SEQ ID NO: 122090 - protein, 10 aa, synthetic construct
TVIRGDQSTL

SEQ ID NO: 122091 - protein, 10 aa, synthetic construct
TVMRGDQSTL

SEQ ID NO: 122092 - protein, 10 aa, synthetic construct
TVWRGDQSTL

SEQ ID NO: 122093 - protein, 10 aa, synthetic construct
TVFRGDQSTL

SEQ ID NO: 122094 - protein, 10 aa, synthetic construct
TVKRGDQSTL

SEQ ID NO: 122095 - protein, 10 aa, synthetic construct
TVRRGDQSTL

SEQ ID NO: 122096 - protein, 10 aa, synthetic construct
TVHRGDQSTL

SEQ ID NO: 122097 - protein, 10 aa, synthetic construct
TVSRGDQSTL

SEQ ID NO: 122098 - protein, 10 aa, synthetic construct
TVTRGDQSTL

SEQ ID NO: 122099 - protein, 10 aa, synthetic construct
TVYRGDQSTL

SEQ ID NO: 122100 - protein, 10 aa, synthetic construct
TVNRGDQSTL

SEQ ID NO: 122101 - protein, 10 aa, synthetic construct
TVQRGDQSTL

SEQ ID NO: 122102 - protein, 10 aa, synthetic construct
TVDRGDQSTL

SEQ ID NO: 122103 - protein, 10 aa, synthetic construct
TVERGDQSTL

SEQ ID NO: 122104 - protein, 10 aa, synthetic construct
TPGRGDQSTL

SEQ ID NO: 122105 - protein, 10 aa, synthetic construct
TPARGDQSTL

SEQ ID NO: 122106 - protein, 10 aa, synthetic construct
TPVRGDQSTL

SEQ ID NO: 122107 - protein, 10 aa, synthetic construct
TPPRGDQSTL

SEQ ID NO: 122108 - protein, 10 aa, synthetic construct
TPLRGDQSTL

SEQ ID NO: 122109 - protein, 10 aa, synthetic construct
TPIRGDQSTL

SEQ ID NO: 122110 - protein, 10 aa, synthetic construct
TPMRGDQSTL

SEQ ID NO: 122111 - protein, 10 aa, synthetic construct
TPWRGDQSTL

SEQ ID NO: 122112 - protein, 10 aa, synthetic construct
TPFRGDQSTL

SEQ ID NO: 122113 - protein, 10 aa, synthetic construct
TPKRGDQSTL

SEQ ID NO: 122114 - protein, 10 aa, synthetic construct
TPRRGDQSTL

SEQ ID NO: 122115 - protein, 10 aa, synthetic construct
TPHRGDQSTL

SEQ ID NO: 122116 - protein, 10 aa, synthetic construct
TPSRGDQSTL

SEQ ID NO: 122117 - protein, 10 aa, synthetic construct
TPTRGDQSTL

SEQ ID NO: 122118 - protein, 10 aa, synthetic construct
TPYRGDQSTL

SEQ ID NO: 122119 - protein, 10 aa, synthetic construct
TPNRGDQSTL

SEQ ID NO: 122120 - protein, 10 aa, synthetic construct
TPQRGDQSTL

SEQ ID NO: 122121 - protein, 10 aa, synthetic construct
TPDRGDQSTL

SEQ ID NO: 122122 - protein, 10 aa, synthetic construct
TPERGDQSTL

SEQ ID NO: 122123 - protein, 10 aa, synthetic construct
TLGRGDQSTL

SEQ ID NO: 122124 - protein, 10 aa, synthetic construct
TLARGDQSTL

SEQ ID NO: 122125 - protein, 10 aa, synthetic construct
TLVRGDQSTL

SEQ ID NO: 122126 - protein, 10 aa, synthetic construct
TLPRGDQSTL

SEQ ID NO: 122127 - protein, 10 aa, synthetic construct
TLLRGDQSTL

SEQ ID NO: 122128 - protein, 10 aa, synthetic construct
TLIRGDQSTL

SEQ ID NO: 122129 - protein, 10 aa, synthetic construct
TLMRGDQSTL

SEQ ID NO: 122130 - protein, 10 aa, synthetic construct
TLWRGDQSTL

SEQ ID NO: 122131 - protein, 10 aa, synthetic construct
TLFRGDQSTL

SEQ ID NO: 122132 - protein, 10 aa, synthetic construct
TLKRGDQSTL

SEQ ID NO: 122133 - protein, 10 aa, synthetic construct
TLRRGDQSTL

SEQ ID NO: 122134 - protein, 10 aa, synthetic construct
TLHRGDQSTL

SEQ ID NO: 122135 - protein, 10 aa, synthetic construct
TLSRGDQSTL

SEQ ID NO: 122136 - protein, 10 aa, synthetic construct
TLTRGDQSTL

SEQ ID NO: 122137 - protein, 10 aa, synthetic construct
TLYRGDQSTL

SEQ ID NO: 122138 - protein, 10 aa, synthetic construct
TLNRGDQSTL

SEQ ID NO: 122139 - protein, 10 aa, synthetic construct
TLQRGDQSTL

SEQ ID NO: 122140 - protein, 10 aa, synthetic construct
TLDRGDQSTL

SEQ ID NO: 122141 - protein, 10 aa, synthetic construct
TLERGDQSTL

SEQ ID NO: 122142 - protein, 10 aa, synthetic construct
TIGRGDQSTL

SEQ ID NO: 122143 - protein, 10 aa, synthetic construct
TIARGDQSTL

SEQ ID NO: 122144 - protein, 10 aa, synthetic construct
TIVRGDQSTL

SEQ ID NO: 122145 - protein, 10 aa, synthetic construct
TIPRGDQSTL

SEQ ID NO: 122146 - protein, 10 aa, synthetic construct
TILRGDQSTL

SEQ ID NO: 122147 - protein, 10 aa, synthetic construct
TIIRGDQSTL

SEQ ID NO: 122148 - protein, 10 aa, synthetic construct
TIMRGDQSTL

SEQ ID NO: 122149 - protein, 10 aa, synthetic construct
TIWRGDQSTL

SEQ ID NO: 122150 - protein, 10 aa, synthetic construct
TIFRGDQSTL

SEQ ID NO: 122151 - protein, 10 aa, synthetic construct
TIKRGDQSTL

SEQ ID NO: 122152 - protein, 10 aa, synthetic construct
TIRRGDQSTL

SEQ ID NO: 122153 - protein, 10 aa, synthetic construct
TIHRGDQSTL

SEQ ID NO: 122154 - protein, 10 aa, synthetic construct
TISRGDQSTL

SEQ ID NO: 122155 - protein, 10 aa, synthetic construct
TITRGDQSTL

SEQ ID NO: 122156 - protein, 10 aa, synthetic construct
TIYRGDQSTL

SEQ ID NO: 122157 - protein, 10 aa, synthetic construct
TINRGDQSTL

SEQ ID NO: 122158 - protein, 10 aa, synthetic construct
TIQRGDQSTL

SEQ ID NO: 122159 - protein, 10 aa, synthetic construct
TIDRGDQSTL

SEQ ID NO: 122160 - protein, 10 aa, synthetic construct
TIERGDQSTL

SEQ ID NO: 122161 - protein, 10 aa, synthetic construct
TMGRGDQSTL

SEQ ID NO: 122162 - protein, 10 aa, synthetic construct
TMARGDQSTL

SEQ ID NO: 122163 - protein, 10 aa, synthetic construct
TMVRGDQSTL

SEQ ID NO: 122164 - protein, 10 aa, synthetic construct
TMPRGDQSTL

SEQ ID NO: 122165 - protein, 10 aa, synthetic construct
TMLRGDQSTL

SEQ ID NO: 122166 - protein, 10 aa, synthetic construct
TMIRGDQSTL

SEQ ID NO: 122167 - protein, 10 aa, synthetic construct
TMMRGDQSTL

SEQ ID NO: 122168 - protein, 10 aa, synthetic construct
TMWRGDQSTL

SEQ ID NO: 122169 - protein, 10 aa, synthetic construct
TMFRGDQSTL

SEQ ID NO: 122170 - protein, 10 aa, synthetic construct
TMKRGDQSTL

SEQ ID NO: 122171 - protein, 10 aa, synthetic construct
TMRRGDQSTL

SEQ ID NO: 122172 - protein, 10 aa, synthetic construct
TMHRGDQSTL

SEQ ID NO: 122173 - protein, 10 aa, synthetic construct
TMSRGDQSTL

SEQ ID NO: 122174 - protein, 10 aa, synthetic construct
TMTRGDQSTL

SEQ ID NO: 122175 - protein, 10 aa, synthetic construct
TMYRGDQSTL

SEQ ID NO: 122176 - protein, 10 aa, synthetic construct
TMNRGDQSTL

SEQ ID NO: 122177 - protein, 10 aa, synthetic construct
TMQRGDQSTL

SEQ ID NO: 122178 - protein, 10 aa, synthetic construct
TMDRGDQSTL

SEQ ID NO: 122179 - protein, 10 aa, synthetic construct
TMERGDQSTL

SEQ ID NO: 122180 - protein, 10 aa, synthetic construct
TWGRGDQSTL

SEQ ID NO: 122181 - protein, 10 aa, synthetic construct
TWARGDQSTL

SEQ ID NO: 122182 - protein, 10 aa, synthetic construct
TWVRGDQSTL

SEQ ID NO: 122183 - protein, 10 aa, synthetic construct
TWPRGDQSTL

SEQ ID NO: 122184 - protein, 10 aa, synthetic construct
TWLRGDQSTL

SEQ ID NO: 122185 - protein, 10 aa, synthetic construct
TWIRGDQSTL

SEQ ID NO: 122186 - protein, 10 aa, synthetic construct
TWMRGDQSTL

SEQ ID NO: 122187 - protein, 10 aa, synthetic construct
TWWRGDQSTL

SEQ ID NO: 122188 - protein, 10 aa, synthetic construct
TWFRGDQSTL

SEQ ID NO: 122189 - protein, 10 aa, synthetic construct
TWKRGDQSTL

SEQ ID NO: 122190 - protein, 10 aa, synthetic construct
TWRRGDQSTL

SEQ ID NO: 122191 - protein, 10 aa, synthetic construct
TWHRGDQSTL

SEQ ID NO: 122192 - protein, 10 aa, synthetic construct
TWSRGDQSTL

SEQ ID NO: 122193 - protein, 10 aa, synthetic construct
TWTRGDQSTL

SEQ ID NO: 122194 - protein, 10 aa, synthetic construct
TWYRGDQSTL

SEQ ID NO: 122195 - protein, 10 aa, synthetic construct
TWNRGDQSTL

SEQ ID NO: 122196 - protein, 10 aa, synthetic construct
TWQRGDQSTL

SEQ ID NO: 122197 - protein, 10 aa, synthetic construct
TWDRGDQSTL

SEQ ID NO: 122198 - protein, 10 aa, synthetic construct
TWERGDQSTL

SEQ ID NO: 122199 - protein, 10 aa, synthetic construct
TFGRGDQSTL

SEQ ID NO: 122200 - protein, 10 aa, synthetic construct
TFARGDQSTL

SEQ ID NO: 122201 - protein, 10 aa, synthetic construct
TFVRGDQSTL

SEQ ID NO: 122202 - protein, 10 aa, synthetic construct
TFPRGDQSTL

SEQ ID NO: 122203 - protein, 10 aa, synthetic construct
TFLRGDQSTL

SEQ ID NO: 122204 - protein, 10 aa, synthetic construct
TFIRGDQSTL

SEQ ID NO: 122205 - protein, 10 aa, synthetic construct
TFMRGDQSTL

SEQ ID NO: 122206 - protein, 10 aa, synthetic construct
TFWRGDQSTL

SEQ ID NO: 122207 - protein, 10 aa, synthetic construct
TFFRGDQSTL

SEQ ID NO: 122208 - protein, 10 aa, synthetic construct
TFKRGDQSTL

SEQ ID NO: 122209 - protein, 10 aa, synthetic construct
TFRRGDQSTL

SEQ ID NO: 122210 - protein, 10 aa, synthetic construct
TFHRGDQSTL

SEQ ID NO: 122211 - protein, 10 aa, synthetic construct
TFSRGDQSTL

SEQ ID NO: 122212 - protein, 10 aa, synthetic construct
TFTRGDQSTL

SEQ ID NO: 122213 - protein, 10 aa, synthetic construct
TFYRGDQSTL

SEQ ID NO: 122214 - protein, 10 aa, synthetic construct
TFNRGDQSTL

SEQ ID NO: 122215 - protein, 10 aa, synthetic construct
TFQRGDQSTL

SEQ ID NO: 122216 - protein, 10 aa, synthetic construct
TFDRGDQSTL

SEQ ID NO: 122217 - protein, 10 aa, synthetic construct
TFERGDQSTL

SEQ ID NO: 122218 - protein, 10 aa, synthetic construct
TKGRGDQSTL

SEQ ID NO: 122219 - protein, 10 aa, synthetic construct
TKARGDQSTL

SEQ ID NO: 122220 - protein, 10 aa, synthetic construct
TKVRGDQSTL

SEQ ID NO: 122221 - protein, 10 aa, synthetic construct
TKPRGDQSTL

SEQ ID NO: 122222 - protein, 10 aa, synthetic construct
TKLRGDQSTL

SEQ ID NO: 122223 - protein, 10 aa, synthetic construct
TKIRGDQSTL

SEQ ID NO: 122224 - protein, 10 aa, synthetic construct
TKMRGDQSTL

SEQ ID NO: 122225 - protein, 10 aa, synthetic construct
TKWRGDQSTL

SEQ ID NO: 122226 - protein, 10 aa, synthetic construct
TKFRGDQSTL

SEQ ID NO: 122227 - protein, 10 aa, synthetic construct
TKKRGDQSTL

SEQ ID NO: 122228 - protein, 10 aa, synthetic construct
TKRRGDQSTL

SEQ ID NO: 122229 - protein, 10 aa, synthetic construct
TKHRGDQSTL

SEQ ID NO: 122230 - protein, 10 aa, synthetic construct
TKSRGDQSTL

SEQ ID NO: 122231 - protein, 10 aa, synthetic construct
TKTRGDQSTL

SEQ ID NO: 122232 - protein, 10 aa, synthetic construct
TKYRGDQSTL

SEQ ID NO: 122233 - protein, 10 aa, synthetic construct
TKNRGDQSTL

SEQ ID NO: 122234 - protein, 10 aa, synthetic construct
TKQRGDQSTL

SEQ ID NO: 122235 - protein, 10 aa, synthetic construct
TKDRGDQSTL

SEQ ID NO: 122236 - protein, 10 aa, synthetic construct
TKERGDQSTL

SEQ ID NO: 122237 - protein, 10 aa, synthetic construct
TRGRGDQSTL

SEQ ID NO: 122238 - protein, 10 aa, synthetic construct
TRARGDQSTL

SEQ ID NO: 122239 - protein, 10 aa, synthetic construct
TRVRGDQSTL

SEQ ID NO: 122240 - protein, 10 aa, synthetic construct
TRPRGDQSTL

SEQ ID NO: 122241 - protein, 10 aa, synthetic construct
TRLRGDQSTL

SEQ ID NO: 122242 - protein, 10 aa, synthetic construct
TRIRGDQSTL

SEQ ID NO: 122243 - protein, 10 aa, synthetic construct
TRMRGDQSTL

SEQ ID NO: 122244 - protein, 10 aa, synthetic construct
TRWRGDQSTL

SEQ ID NO: 122245 - protein, 10 aa, synthetic construct
TRFRGDQSTL

SEQ ID NO: 122246 - protein, 10 aa, synthetic construct
TRKRGDQSTL

SEQ ID NO: 122247 - protein, 10 aa, synthetic construct
TRRRGDQSTL

SEQ ID NO: 122248 - protein, 10 aa, synthetic construct
TRHRGDQSTL

SEQ ID NO: 122249 - protein, 10 aa, synthetic construct
TRSRGDQSTL

SEQ ID NO: 122250 - protein, 10 aa, synthetic construct
TRTRGDQSTL

SEQ ID NO: 122251 - protein, 10 aa, synthetic construct
TRYRGDQSTL

SEQ ID NO: 122252 - protein, 10 aa, synthetic construct
TRNRGDQSTL

SEQ ID NO: 122253 - protein, 10 aa, synthetic construct
TRQRGDQSTL

SEQ ID NO: 122254 - protein, 10 aa, synthetic construct
TRDRGDQSTL

SEQ ID NO: 122255 - protein, 10 aa, synthetic construct
TRERGDQSTL

SEQ ID NO: 122256 - protein, 10 aa, synthetic construct
THGRGDQSTL

SEQ ID NO: 122257 - protein, 10 aa, synthetic construct
THARGDQSTL

SEQ ID NO: 122258 - protein, 10 aa, synthetic construct
THVRGDQSTL

SEQ ID NO: 122259 - protein, 10 aa, synthetic construct
THPRGDQSTL

SEQ ID NO: 122260 - protein, 10 aa, synthetic construct
THLRGDQSTL

SEQ ID NO: 122261 - protein, 10 aa, synthetic construct
THIRGDQSTL

SEQ ID NO: 122262 - protein, 10 aa, synthetic construct
THMRGDQSTL

SEQ ID NO: 122263 - protein, 10 aa, synthetic construct
THWRGDQSTL

SEQ ID NO: 122264 - protein, 10 aa, synthetic construct
THFRGDQSTL

SEQ ID NO: 122265 - protein, 10 aa, synthetic construct
THKRGDQSTL

SEQ ID NO: 122266 - protein, 10 aa, synthetic construct
THRRGDQSTL

SEQ ID NO: 122267 - protein, 10 aa, synthetic construct
THHRGDQSTL

SEQ ID NO: 122268 - protein, 10 aa, synthetic construct
THSRGDQSTL

SEQ ID NO: 122269 - protein, 10 aa, synthetic construct
THTRGDQSTL

SEQ ID NO: 122270 - protein, 10 aa, synthetic construct
THYRGDQSTL

SEQ ID NO: 122271 - protein, 10 aa, synthetic construct
THNRGDQSTL

SEQ ID NO: 122272 - protein, 10 aa, synthetic construct
THQRGDQSTL

SEQ ID NO: 122273 - protein, 10 aa, synthetic construct
THDRGDQSTL

SEQ ID NO: 122274 - protein, 10 aa, synthetic construct
THERGDQSTL

SEQ ID NO: 122275 - protein, 10 aa, synthetic construct
TSGRGDQSTL

SEQ ID NO: 122276 - protein, 10 aa, synthetic construct
TSARGDQSTL

SEQ ID NO: 122277 - protein, 10 aa, synthetic construct
TSVRGDQSTL

SEQ ID NO: 122278 - protein, 10 aa, synthetic construct
TSPRGDQSTL

SEQ ID NO: 122279 - protein, 10 aa, synthetic construct
TSLRGDQSTL

SEQ ID NO: 122280 - protein, 10 aa, synthetic construct
TSIRGDQSTL

SEQ ID NO: 122281 - protein, 10 aa, synthetic construct
TSMRGDQSTL

SEQ ID NO: 122282 - protein, 10 aa, synthetic construct
TSWRGDQSTL

SEQ ID NO: 122283 - protein, 10 aa, synthetic construct
TSFRGDQSTL

SEQ ID NO: 122284 - protein, 10 aa, synthetic construct
TSKRGDQSTL

SEQ ID NO: 122285 - protein, 10 aa, synthetic construct
TSRRGDQSTL

SEQ ID NO: 122286 - protein, 10 aa, synthetic construct
TSHRGDQSTL

SEQ ID NO: 122287 - protein, 10 aa, synthetic construct
TSSRGDQSTL

SEQ ID NO: 122288 - protein, 10 aa, synthetic construct
TSTRGDQSTL

SEQ ID NO: 122289 - protein, 10 aa, synthetic construct
TSYRGDQSTL

SEQ ID NO: 122290 - protein, 10 aa, synthetic construct
TSNRGDQSTL

SEQ ID NO: 122291 - protein, 10 aa, synthetic construct
TSQRGDQSTL

SEQ ID NO: 122292 - protein, 10 aa, synthetic construct
TSDRGDQSTL

SEQ ID NO: 122293 - protein, 10 aa, synthetic construct
TSERGDQSTL

SEQ ID NO: 122294 - protein, 10 aa, synthetic construct
TTGRGDQSTL

SEQ ID NO: 122295 - protein, 10 aa, synthetic construct
TTARGDQSTL

SEQ ID NO: 122296 - protein, 10 aa, synthetic construct
TTVRGDQSTL

SEQ ID NO: 122297 - protein, 10 aa, synthetic construct
TTPRGDQSTL

SEQ ID NO: 122298 - protein, 10 aa, synthetic construct
TTLRGDQSTL

SEQ ID NO: 122299 - protein, 10 aa, synthetic construct
TTIRGDQSTL

SEQ ID NO: 122300 - protein, 10 aa, synthetic construct
TTMRGDQSTL

SEQ ID NO: 122301 - protein, 10 aa, synthetic construct
TTWRGDQSTL

SEQ ID NO: 122302 - protein, 10 aa, synthetic construct
TTFRGDQSTL

SEQ ID NO: 122303 - protein, 10 aa, synthetic construct
TTKRGDQSTL

SEQ ID NO: 122304 - protein, 10 aa, synthetic construct
TTRRGDQSTL

SEQ ID NO: 122305 - protein, 10 aa, synthetic construct
TTHRGDQSTL

SEQ ID NO: 122306 - protein, 10 aa, synthetic construct
TTSRGDQSTL

SEQ ID NO: 122307 - protein, 10 aa, synthetic construct
TTTRGDQSTL

SEQ ID NO: 122308 - protein, 10 aa, synthetic construct
TTYRGDQSTL

SEQ ID NO: 122309 - protein, 10 aa, synthetic construct
TTNRGDQSTL

SEQ ID NO: 122310 - protein, 10 aa, synthetic construct
TTQRGDQSTL

SEQ ID NO: 122311 - protein, 10 aa, synthetic construct
TTDRGDQSTL

SEQ ID NO: 122312 - protein, 10 aa, synthetic construct
TTERGDQSTL

SEQ ID NO: 122313 - protein, 10 aa, synthetic construct
TYGRGDQSTL

SEQ ID NO: 122314 - protein, 10 aa, synthetic construct
TYARGDQSTL

SEQ ID NO: 122315 - protein, 10 aa, synthetic construct
TYVRGDQSTL

SEQ ID NO: 122316 - protein, 10 aa, synthetic construct
TYPRGDQSTL

SEQ ID NO: 122317 - protein, 10 aa, synthetic construct
TYLRGDQSTL

SEQ ID NO: 122318 - protein, 10 aa, synthetic construct
TYIRGDQSTL

SEQ ID NO: 122319 - protein, 10 aa, synthetic construct
TYMRGDQSTL

SEQ ID NO: 122320 - protein, 10 aa, synthetic construct
TYWRGDQSTL

SEQ ID NO: 122321 - protein, 10 aa, synthetic construct
TYFRGDQSTL

SEQ ID NO: 122322 - protein, 10 aa, synthetic construct
TYKRGDQSTL

SEQ ID NO: 122323 - protein, 10 aa, synthetic construct
TYRRGDQSTL

SEQ ID NO: 122324 - protein, 10 aa, synthetic construct
TYHRGDQSTL

SEQ ID NO: 122325 - protein, 10 aa, synthetic construct
TYSRGDQSTL

SEQ ID NO: 122326 - protein, 10 aa, synthetic construct
TYTRGDQSTL

SEQ ID NO: 122327 - protein, 10 aa, synthetic construct
TYYRGDQSTL

SEQ ID NO: 122328 - protein, 10 aa, synthetic construct
TYNRGDQSTL

SEQ ID NO: 122329 - protein, 10 aa, synthetic construct
TYQRGDQSTL

SEQ ID NO: 122330 - protein, 10 aa, synthetic construct
TYDRGDQSTL

SEQ ID NO: 122331 - protein, 10 aa, synthetic construct
TYERGDQSTL

SEQ ID NO: 122332 - protein, 10 aa, synthetic construct
TNGRGDQSTL

SEQ ID NO: 122333 - protein, 10 aa, synthetic construct
TNARGDQSTL

SEQ ID NO: 122334 - protein, 10 aa, synthetic construct
TNVRGDQSTL

SEQ ID NO: 122335 - protein, 10 aa, synthetic construct
TNPRGDQSTL

SEQ ID NO: 122336 - protein, 10 aa, synthetic construct
TNLRGDQSTL

SEQ ID NO: 122337 - protein, 10 aa, synthetic construct
TNIRGDQSTL

SEQ ID NO: 122338 - protein, 10 aa, synthetic construct
TNMRGDQSTL

SEQ ID NO: 122339 - protein, 10 aa, synthetic construct
TNWRGDQSTL

SEQ ID NO: 122340 - protein, 10 aa, synthetic construct
TNFRGDQSTL

SEQ ID NO: 122341 - protein, 10 aa, synthetic construct
TNKRGDQSTL

SEQ ID NO: 122342 - protein, 10 aa, synthetic construct
TNRRGDQSTL

SEQ ID NO: 122343 - protein, 10 aa, synthetic construct
TNHRGDQSTL

SEQ ID NO: 122344 - protein, 10 aa, synthetic construct
TNSRGDQSTL

SEQ ID NO: 122345 - protein, 10 aa, synthetic construct
TNTRGDQSTL

SEQ ID NO: 122346 - protein, 10 aa, synthetic construct
TNYRGDQSTL

SEQ ID NO: 122347 - protein, 10 aa, synthetic construct
TNNRGDQSTL

SEQ ID NO: 122348 - protein, 10 aa, synthetic construct
TNQRGDQSTL

SEQ ID NO: 122349 - protein, 10 aa, synthetic construct
TNDRGDQSTL

SEQ ID NO: 122350 - protein, 10 aa, synthetic construct
TNERGDQSTL

SEQ ID NO: 122351 - protein, 10 aa, synthetic construct
TQGRGDQSTL

SEQ ID NO: 122352 - protein, 10 aa, synthetic construct
TQARGDQSTL

SEQ ID NO: 122353 - protein, 10 aa, synthetic construct
TQVRGDQSTL

SEQ ID NO: 122354 - protein, 10 aa, synthetic construct
TQPRGDQSTL

SEQ ID NO: 122355 - protein, 10 aa, synthetic construct
TQLRGDQSTL

SEQ ID NO: 122356 - protein, 10 aa, synthetic construct
TQIRGDQSTL

SEQ ID NO: 122357 - protein, 10 aa, synthetic construct
TQMRGDQSTL

SEQ ID NO: 122358 - protein, 10 aa, synthetic construct
TQWRGDQSTL

SEQ ID NO: 122359 - protein, 10 aa, synthetic construct
TQFRGDQSTL

SEQ ID NO: 122360 - protein, 10 aa, synthetic construct
TQKRGDQSTL

SEQ ID NO: 122361 - protein, 10 aa, synthetic construct
TQRRGDQSTL

SEQ ID NO: 122362 - protein, 10 aa, synthetic construct
TQHRGDQSTL

SEQ ID NO: 122363 - protein, 10 aa, synthetic construct
TQSRGDQSTL

SEQ ID NO: 122364 - protein, 10 aa, synthetic construct
TQTRGDQSTL

SEQ ID NO: 122365 - protein, 10 aa, synthetic construct
TQYRGDQSTL

SEQ ID NO: 122366 - protein, 10 aa, synthetic construct
TQNRGDQSTL

SEQ ID NO: 122367 - protein, 10 aa, synthetic construct
TQQRGDQSTL

SEQ ID NO: 122368 - protein, 10 aa, synthetic construct
TQDRGDQSTL

SEQ ID NO: 122369 - protein, 10 aa, synthetic construct
TQERGDQSTL

SEQ ID NO: 122370 - protein, 10 aa, synthetic construct
TDGRGDQSTL

SEQ ID NO: 122371 - protein, 10 aa, synthetic construct
TDARGDQSTL

SEQ ID NO: 122372 - protein, 10 aa, synthetic construct
TDVRGDQSTL

SEQ ID NO: 122373 - protein, 10 aa, synthetic construct
TDPRGDQSTL

SEQ ID NO: 122374 - protein, 10 aa, synthetic construct
TDLRGDQSTL

SEQ ID NO: 122375 - protein, 10 aa, synthetic construct
TDIRGDQSTL

SEQ ID NO: 122376 - protein, 10 aa, synthetic construct
TDMRGDQSTL

SEQ ID NO: 122377 - protein, 10 aa, synthetic construct
TDWRGDQSTL

SEQ ID NO: 122378 - protein, 10 aa, synthetic construct
TDFRGDQSTL

SEQ ID NO: 122379 - protein, 10 aa, synthetic construct
TDKRGDQSTL

SEQ ID NO: 122380 - protein, 10 aa, synthetic construct
TDRRGDQSTL

SEQ ID NO: 122381 - protein, 10 aa, synthetic construct
TDHRGDQSTL

SEQ ID NO: 122382 - protein, 10 aa, synthetic construct
TDSRGDQSTL

SEQ ID NO: 122383 - protein, 10 aa, synthetic construct
TDTRGDQSTL

SEQ ID NO: 122384 - protein, 10 aa, synthetic construct
TDYRGDQSTL

SEQ ID NO: 122385 - protein, 10 aa, synthetic construct
TDNRGDQSTL

SEQ ID NO: 122386 - protein, 10 aa, synthetic construct
TDQRGDQSTL

SEQ ID NO: 122387 - protein, 10 aa, synthetic construct
TDDRGDQSTL

SEQ ID NO: 122388 - protein, 10 aa, synthetic construct
TDERGDQSTL

SEQ ID NO: 122389 - protein, 10 aa, synthetic construct
TEGRGDQSTL

SEQ ID NO: 122390 - protein, 10 aa, synthetic construct
TEARGDQSTL

SEQ ID NO: 122391 - protein, 10 aa, synthetic construct
TEVRGDQSTL

SEQ ID NO: 122392 - protein, 10 aa, synthetic construct
TEPRGDQSTL

SEQ ID NO: 122393 - protein, 10 aa, synthetic construct
TELRGDQSTL

SEQ ID NO: 122394 - protein, 10 aa, synthetic construct
TEIRGDQSTL

SEQ ID NO: 122395 - protein, 10 aa, synthetic construct
TEMRGDQSTL

SEQ ID NO: 122396 - protein, 10 aa, synthetic construct
TEWRGDQSTL

SEQ ID NO: 122397 - protein, 10 aa, synthetic construct
TEFRGDQSTL

SEQ ID NO: 122398 - protein, 10 aa, synthetic construct
TEKRGDQSTL

SEQ ID NO: 122399 - protein, 10 aa, synthetic construct
TERRGDQSTL

SEQ ID NO: 122400 - protein, 10 aa, synthetic construct
TEHRGDQSTL

SEQ ID NO: 122401 - protein, 10 aa, synthetic construct
TESRGDQSTL

SEQ ID NO: 122402 - protein, 10 aa, synthetic construct
TETRGDQSTL

SEQ ID NO: 122403 - protein, 10 aa, synthetic construct
TEYRGDQSTL

SEQ ID NO: 122404 - protein, 10 aa, synthetic construct
TENRGDQSTL

SEQ ID NO: 122405 - protein, 10 aa, synthetic construct
TEQRGDQSTL

SEQ ID NO: 122406 - protein, 10 aa, synthetic construct
TEDRGDQSTL

SEQ ID NO: 122407 - protein, 10 aa, synthetic construct
TEERGDQSTL

SEQ ID NO: 122408 - protein, 10 aa, synthetic construct
AGGRGDQSTL

SEQ ID NO: 122409 - protein, 10 aa, synthetic construct
AGARGDQSTL

SEQ ID NO: 122410 - protein, 10 aa, synthetic construct
AGVRGDQSTL

SEQ ID NO: 122411 - protein, 10 aa, synthetic construct
AGPRGDQSTL

SEQ ID NO: 122412 - protein, 10 aa, synthetic construct
AGLRGDQSTL

SEQ ID NO: 122413 - protein, 10 aa, synthetic construct
AGIRGDQSTL

SEQ ID NO: 122414 - protein, 10 aa, synthetic construct
AGMRGDQSTL

SEQ ID NO: 122415 - protein, 10 aa, synthetic construct
AGWRGDQSTL

SEQ ID NO: 122416 - protein, 10 aa, synthetic construct
AGFRGDQSTL

SEQ ID NO: 122417 - protein, 10 aa, synthetic construct
AGKRGDQSTL

SEQ ID NO: 122418 - protein, 10 aa, synthetic construct
AGRRGDQSTL

SEQ ID NO: 122419 - protein, 10 aa, synthetic construct
AGHRGDQSTL

SEQ ID NO: 122420 - protein, 10 aa, synthetic construct
AGSRGDQSTL

SEQ ID NO: 122421 - protein, 10 aa, synthetic construct
AGTRGDQSTL

SEQ ID NO: 122422 - protein, 10 aa, synthetic construct
AGYRGDQSTL

SEQ ID NO: 122423 - protein, 10 aa, synthetic construct
AGNRGDQSTL

SEQ ID NO: 122424 - protein, 10 aa, synthetic construct
AGQRGDQSTL

SEQ ID NO: 122425 - protein, 10 aa, synthetic construct
AGDRGDQSTL

SEQ ID NO: 122426 - protein, 10 aa, synthetic construct
AGERGDQSTL

SEQ ID NO: 122427 - protein, 10 aa, synthetic construct
AAGRGDQSTL

SEQ ID NO: 122428 - protein, 10 aa, synthetic construct
AAARGDQSTL

SEQ ID NO: 122429 - protein, 10 aa, synthetic construct
AAVRGDQSTL

SEQ ID NO: 122430 - protein, 10 aa, synthetic construct
AAPRGDQSTL

SEQ ID NO: 122431 - protein, 10 aa, synthetic construct
AALRGDQSTL

SEQ ID NO: 122432 - protein, 10 aa, synthetic construct
AAIRGDQSTL

SEQ ID NO: 122433 - protein, 10 aa, synthetic construct
AAMRGDQSTL

SEQ ID NO: 122434 - protein, 10 aa, synthetic construct
AAWRGDQSTL

SEQ ID NO: 122435 - protein, 10 aa, synthetic construct
AAFRGDQSTL

SEQ ID NO: 122436 - protein, 10 aa, synthetic construct
AAKRGDQSTL

SEQ ID NO: 122437 - protein, 10 aa, synthetic construct
AARRGDQSTL

SEQ ID NO: 122438 - protein, 10 aa, synthetic construct
AAHRGDQSTL

SEQ ID NO: 122439 - protein, 10 aa, synthetic construct
AASRGDQSTL

SEQ ID NO: 122440 - protein, 10 aa, synthetic construct
AATRGDQSTL

SEQ ID NO: 122441 - protein, 10 aa, synthetic construct
AAYRGDQSTL

SEQ ID NO: 122442 - protein, 10 aa, synthetic construct
AANRGDQSTL

SEQ ID NO: 122443 - protein, 10 aa, synthetic construct
AAQRGDQSTL

SEQ ID NO: 122444 - protein, 10 aa, synthetic construct
AADRGDQSTL

SEQ ID NO: 122445 - protein, 10 aa, synthetic construct
AAERGDQSTL

SEQ ID NO: 122446 - protein, 10 aa, synthetic construct
AVGRGDQSTL

SEQ ID NO: 122447 - protein, 10 aa, synthetic construct
AVARGDQSTL

SEQ ID NO: 122448 - protein, 10 aa, synthetic construct
AVVRGDQSTL

SEQ ID NO: 122449 - protein, 10 aa, synthetic construct
AVPRGDQSTL

SEQ ID NO: 122450 - protein, 10 aa, synthetic construct
AVLRGDQSTL

SEQ ID NO: 122451 - protein, 10 aa, synthetic construct
AVIRGDQSTL

SEQ ID NO: 122452 - protein, 10 aa, synthetic construct
AVMRGDQSTL

SEQ ID NO: 122453 - protein, 10 aa, synthetic construct
AVWRGDQSTL

SEQ ID NO: 122454 - protein, 10 aa, synthetic construct
AVFRGDQSTL

SEQ ID NO: 122455 - protein, 10 aa, synthetic construct
AVKRGDQSTL

SEQ ID NO: 122456 - protein, 10 aa, synthetic construct
AVRRGDQSTL

SEQ ID NO: 122457 - protein, 10 aa, synthetic construct
AVHRGDQSTL

SEQ ID NO: 122458 - protein, 10 aa, synthetic construct
AVSRGDQSTL

SEQ ID NO: 122459 - protein, 10 aa, synthetic construct
AVTRGDQSTL

SEQ ID NO: 122460 - protein, 10 aa, synthetic construct
AVYRGDQSTL

SEQ ID NO: 122461 - protein, 10 aa, synthetic construct
AVNRGDQSTL

SEQ ID NO: 122462 - protein, 10 aa, synthetic construct
AVQRGDQSTL

SEQ ID NO: 122463 - protein, 10 aa, synthetic construct
AVDRGDQSTL

SEQ ID NO: 122464 - protein, 10 aa, synthetic construct
AVERGDQSTL

SEQ ID NO: 122465 - protein, 10 aa, synthetic construct
APGRGDQSTL

SEQ ID NO: 122466 - protein, 10 aa, synthetic construct
APARGDQSTL

SEQ ID NO: 122467 - protein, 10 aa, synthetic construct
APVRGDQSTL

SEQ ID NO: 122468 - protein, 10 aa, synthetic construct
APPRGDQSTL

SEQ ID NO: 122469 - protein, 10 aa, synthetic construct
APLRGDQSTL

SEQ ID NO: 122470 - protein, 10 aa, synthetic construct
APIRGDQSTL

SEQ ID NO: 122471 - protein, 10 aa, synthetic construct
APMRGDQSTL

SEQ ID NO: 122472 - protein, 10 aa, synthetic construct
APWRGDQSTL

SEQ ID NO: 122473 - protein, 10 aa, synthetic construct
APFRGDQSTL

SEQ ID NO: 122474 - protein, 10 aa, synthetic construct
APKRGDQSTL

SEQ ID NO: 122475 - protein, 10 aa, synthetic construct
APRRGDQSTL

SEQ ID NO: 122476 - protein, 10 aa, synthetic construct
APHRGDQSTL

SEQ ID NO: 122477 - protein, 10 aa, synthetic construct
APSRGDQSTL

SEQ ID NO: 122478 - protein, 10 aa, synthetic construct
APTRGDQSTL

SEQ ID NO: 122479 - protein, 10 aa, synthetic construct
APYRGDQSTL

SEQ ID NO: 122480 - protein, 10 aa, synthetic construct
APNRGDQSTL

SEQ ID NO: 122481 - protein, 10 aa, synthetic construct
APQRGDQSTL

SEQ ID NO: 122482 - protein, 10 aa, synthetic construct
APDRGDQSTL

SEQ ID NO: 122483 - protein, 10 aa, synthetic construct
APERGDQSTL

SEQ ID NO: 122484 - protein, 10 aa, synthetic construct
ALGRGDQSTL

SEQ ID NO: 122485 - protein, 10 aa, synthetic construct
ALARGDQSTL

SEQ ID NO: 122486 - protein, 10 aa, synthetic construct
ALVRGDQSTL

SEQ ID NO: 122487 - protein, 10 aa, synthetic construct
ALPRGDQSTL

SEQ ID NO: 122488 - protein, 10 aa, synthetic construct
ALLRGDQSTL

SEQ ID NO: 122489 - protein, 10 aa, synthetic construct
ALIRGDQSTL

SEQ ID NO: 122490 - protein, 10 aa, synthetic construct
ALMRGDQSTL

SEQ ID NO: 122491 - protein, 10 aa, synthetic construct
ALWRGDQSTL

SEQ ID NO: 122492 - protein, 10 aa, synthetic construct
ALFRGDQSTL

SEQ ID NO: 122493 - protein, 10 aa, synthetic construct
ALKRGDQSTL

SEQ ID NO: 122494 - protein, 10 aa, synthetic construct
ALRRGDQSTL

SEQ ID NO: 122495 - protein, 10 aa, synthetic construct
ALHRGDQSTL

SEQ ID NO: 122496 - protein, 10 aa, synthetic construct
ALSRGDQSTL

SEQ ID NO: 122497 - protein, 10 aa, synthetic construct
ALTRGDQSTL

SEQ ID NO: 122498 - protein, 10 aa, synthetic construct
ALYRGDQSTL

SEQ ID NO: 122499 - protein, 10 aa, synthetic construct
ALNRGDQSTL

SEQ ID NO: 122500 - protein, 10 aa, synthetic construct
ALQRGDQSTL

SEQ ID NO: 122501 - protein, 10 aa, synthetic construct
ALDRGDQSTL

SEQ ID NO: 122502 - protein, 10 aa, synthetic construct
ALERGDQSTL

SEQ ID NO: 122503 - protein, 10 aa, synthetic construct
AIGRGDQSTL

SEQ ID NO: 122504 - protein, 10 aa, synthetic construct
AIARGDQSTL

SEQ ID NO: 122505 - protein, 10 aa, synthetic construct
AIVRGDQSTL

SEQ ID NO: 122506 - protein, 10 aa, synthetic construct
AIPRGDQSTL

SEQ ID NO: 122507 - protein, 10 aa, synthetic construct
AILRGDQSTL

SEQ ID NO: 122508 - protein, 10 aa, synthetic construct
AIIRGDQSTL

SEQ ID NO: 122509 - protein, 10 aa, synthetic construct
AIMRGDQSTL

SEQ ID NO: 122510 - protein, 10 aa, synthetic construct
AIWRGDQSTL

SEQ ID NO: 122511 - protein, 10 aa, synthetic construct
AIFRGDQSTL

SEQ ID NO: 122512 - protein, 10 aa, synthetic construct
AIKRGDQSTL

SEQ ID NO: 122513 - protein, 10 aa, synthetic construct
AIRRGDQSTL

SEQ ID NO: 122514 - protein, 10 aa, synthetic construct
AIHRGDQSTL

SEQ ID NO: 122515 - protein, 10 aa, synthetic construct
AISRGDQSTL

SEQ ID NO: 122516 - protein, 10 aa, synthetic construct
AITRGDQSTL

SEQ ID NO: 122517 - protein, 10 aa, synthetic construct
AIYRGDQSTL

SEQ ID NO: 122518 - protein, 10 aa, synthetic construct
AINRGDQSTL

SEQ ID NO: 122519 - protein, 10 aa, synthetic construct
AIQRGDQSTL

SEQ ID NO: 122520 - protein, 10 aa, synthetic construct
AIDRGDQSTL

SEQ ID NO: 122521 - protein, 10 aa, synthetic construct
AIERGDQSTL

SEQ ID NO: 122522 - protein, 10 aa, synthetic construct
AMGRGDQSTL

SEQ ID NO: 122523 - protein, 10 aa, synthetic construct
AMARGDQSTL

SEQ ID NO: 122524 - protein, 10 aa, synthetic construct
AMVRGDQSTL

SEQ ID NO: 122525 - protein, 10 aa, synthetic construct
AMPRGDQSTL

SEQ ID NO: 122526 - protein, 10 aa, synthetic construct
AMLRGDQSTL

SEQ ID NO: 122527 - protein, 10 aa, synthetic construct
AMIRGDQSTL

SEQ ID NO: 122528 - protein, 10 aa, synthetic construct
AMMRGDQSTL

SEQ ID NO: 122529 - protein, 10 aa, synthetic construct
AMWRGDQSTL

SEQ ID NO: 122530 - protein, 10 aa, synthetic construct
AMFRGDQSTL

SEQ ID NO: 122531 - protein, 10 aa, synthetic construct
AMKRGDQSTL

SEQ ID NO: 122532 - protein, 10 aa, synthetic construct
AMRRGDQSTL

SEQ ID NO: 122533 - protein, 10 aa, synthetic construct
AMHRGDQSTL

SEQ ID NO: 122534 - protein, 10 aa, synthetic construct
AMSRGDQSTL

SEQ ID NO: 122535 - protein, 10 aa, synthetic construct
AMTRGDQSTL

SEQ ID NO: 122536 - protein, 10 aa, synthetic construct
AMYRGDQSTL

SEQ ID NO: 122537 - protein, 10 aa, synthetic construct
AMNRGDQSTL

SEQ ID NO: 122538 - protein, 10 aa, synthetic construct
AMQRGDQSTL

SEQ ID NO: 122539 - protein, 10 aa, synthetic construct
AMDRGDQSTL

SEQ ID NO: 122540 - protein, 10 aa, synthetic construct
AMERGDQSTL

SEQ ID NO: 122541 - protein, 10 aa, synthetic construct
AWGRGDQSTL

SEQ ID NO: 122542 - protein, 10 aa, synthetic construct
AWARGDQSTL

SEQ ID NO: 122543 - protein, 10 aa, synthetic construct
AWVRGDQSTL

SEQ ID NO: 122544 - protein, 10 aa, synthetic construct
AWPRGDQSTL

SEQ ID NO: 122545 - protein, 10 aa, synthetic construct
AWLRGDQSTL

SEQ ID NO: 122546 - protein, 10 aa, synthetic construct
AWIRGDQSTL

SEQ ID NO: 122547 - protein, 10 aa, synthetic construct
AWMRGDQSTL

SEQ ID NO: 122548 - protein, 10 aa, synthetic construct
AWWRGDQSTL

SEQ ID NO: 122549 - protein, 10 aa, synthetic construct
AWFRGDQSTL

SEQ ID NO: 122550 - protein, 10 aa, synthetic construct
AWKRGDQSTL

SEQ ID NO: 122551 - protein, 10 aa, synthetic construct
AWRRGDQSTL

SEQ ID NO: 122552 - protein, 10 aa, synthetic construct
AWHRGDQSTL

SEQ ID NO: 122553 - protein, 10 aa, synthetic construct
AWSRGDQSTL

SEQ ID NO: 122554 - protein, 10 aa, synthetic construct
AWTRGDQSTL

SEQ ID NO: 122555 - protein, 10 aa, synthetic construct
AWYRGDQSTL

SEQ ID NO: 122556 - protein, 10 aa, synthetic construct
AWNRGDQSTL

SEQ ID NO: 122557 - protein, 10 aa, synthetic construct
AWQRGDQSTL

SEQ ID NO: 122558 - protein, 10 aa, synthetic construct
AWDRGDQSTL

SEQ ID NO: 122559 - protein, 10 aa, synthetic construct
AWERGDQSTL

SEQ ID NO: 122560 - protein, 10 aa, synthetic construct
AFGRGDQSTL

SEQ ID NO: 122561 - protein, 10 aa, synthetic construct
AFARGDQSTL

SEQ ID NO: 122562 - protein, 10 aa, synthetic construct
AFVRGDQSTL

SEQ ID NO: 122563 - protein, 10 aa, synthetic construct
AFPRGDQSTL

SEQ ID NO: 122564 - protein, 10 aa, synthetic construct
AFLRGDQSTL

SEQ ID NO: 122565 - protein, 10 aa, synthetic construct
AFIRGDQSTL

SEQ ID NO: 122566 - protein, 10 aa, synthetic construct
AFMRGDQSTL

SEQ ID NO: 122567 - protein, 10 aa, synthetic construct
AFWRGDQSTL

SEQ ID NO: 122568 - protein, 10 aa, synthetic construct
AFFRGDQSTL

SEQ ID NO: 122569 - protein, 10 aa, synthetic construct
AFKRGDQSTL

SEQ ID NO: 122570 - protein, 10 aa, synthetic construct
AFRRGDQSTL

SEQ ID NO: 122571 - protein, 10 aa, synthetic construct
AFHRGDQSTL

SEQ ID NO: 122572 - protein, 10 aa, synthetic construct
AFSRGDQSTL

SEQ ID NO: 122573 - protein, 10 aa, synthetic construct
AFTRGDQSTL

SEQ ID NO: 122574 - protein, 10 aa, synthetic construct
AFYRGDQSTL

SEQ ID NO: 122575 - protein, 10 aa, synthetic construct
AFNRGDQSTL

SEQ ID NO: 122576 - protein, 10 aa, synthetic construct
AFQRGDQSTL

SEQ ID NO: 122577 - protein, 10 aa, synthetic construct
AFDRGDQSTL

SEQ ID NO: 122578 - protein, 10 aa, synthetic construct
AFERGDQSTL

SEQ ID NO: 122579 - protein, 10 aa, synthetic construct
AKGRGDQSTL

SEQ ID NO: 122580 - protein, 10 aa, synthetic construct
AKARGDQSTL

SEQ ID NO: 122581 - protein, 10 aa, synthetic construct
AKVRGDQSTL

SEQ ID NO: 122582 - protein, 10 aa, synthetic construct
AKPRGDQSTL

SEQ ID NO: 122583 - protein, 10 aa, synthetic construct
AKLRGDQSTL

SEQ ID NO: 122584 - protein, 10 aa, synthetic construct
AKIRGDQSTL

SEQ ID NO: 122585 - protein, 10 aa, synthetic construct
AKMRGDQSTL

SEQ ID NO: 122586 - protein, 10 aa, synthetic construct
AKWRGDQSTL

SEQ ID NO: 122587 - protein, 10 aa, synthetic construct
AKFRGDQSTL

SEQ ID NO: 122588 - protein, 10 aa, synthetic construct
AKKRGDQSTL

SEQ ID NO: 122589 - protein, 10 aa, synthetic construct
AKRRGDQSTL

SEQ ID NO: 122590 - protein, 10 aa, synthetic construct
AKHRGDQSTL

SEQ ID NO: 122591 - protein, 10 aa, synthetic construct
AKSRGDQSTL

SEQ ID NO: 122592 - protein, 10 aa, synthetic construct
AKTRGDQSTL

SEQ ID NO: 122593 - protein, 10 aa, synthetic construct
AKYRGDQSTL

SEQ ID NO: 122594 - protein, 10 aa, synthetic construct
AKNRGDQSTL

SEQ ID NO: 122595 - protein, 10 aa, synthetic construct
AKQRGDQSTL

SEQ ID NO: 122596 - protein, 10 aa, synthetic construct
AKDRGDQSTL

SEQ ID NO: 122597 - protein, 10 aa, synthetic construct
AKERGDQSTL

SEQ ID NO: 122598 - protein, 10 aa, synthetic construct
ARGRGDQSTL

SEQ ID NO: 122599 - protein, 10 aa, synthetic construct
ARARGDQSTL

SEQ ID NO: 122600 - protein, 10 aa, synthetic construct
ARVRGDQSTL

SEQ ID NO: 122601 - protein, 10 aa, synthetic construct
ARPRGDQSTL

SEQ ID NO: 122602 - protein, 10 aa, synthetic construct
ARLRGDQSTL

SEQ ID NO: 122603 - protein, 10 aa, synthetic construct
ARIRGDQSTL

SEQ ID NO: 122604 - protein, 10 aa, synthetic construct
ARMRGDQSTL

SEQ ID NO: 122605 - protein, 10 aa, synthetic construct
ARWRGDQSTL

SEQ ID NO: 122606 - protein, 10 aa, synthetic construct
ARFRGDQSTL

SEQ ID NO: 122607 - protein, 10 aa, synthetic construct
ARKRGDQSTL

SEQ ID NO: 122608 - protein, 10 aa, synthetic construct
ARRRGDQSTL

SEQ ID NO: 122609 - protein, 10 aa, synthetic construct
ARHRGDQSTL

SEQ ID NO: 122610 - protein, 10 aa, synthetic construct
ARSRGDQSTL

SEQ ID NO: 122611 - protein, 10 aa, synthetic construct
ARTRGDQSTL

SEQ ID NO: 122612 - protein, 10 aa, synthetic construct
ARYRGDQSTL

SEQ ID NO: 122613 - protein, 10 aa, synthetic construct
ARNRGDQSTL

SEQ ID NO: 122614 - protein, 10 aa, synthetic construct
ARQRGDQSTL

SEQ ID NO: 122615 - protein, 10 aa, synthetic construct
ARDRGDQSTL

SEQ ID NO: 122616 - protein, 10 aa, synthetic construct
ARERGDQSTL

SEQ ID NO: 122617 - protein, 10 aa, synthetic construct
AHGRGDQSTL

SEQ ID NO: 122618 - protein, 10 aa, synthetic construct
AHARGDQSTL

SEQ ID NO: 122619 - protein, 10 aa, synthetic construct
AHVRGDQSTL

SEQ ID NO: 122620 - protein, 10 aa, synthetic construct
AHPRGDQSTL

SEQ ID NO: 122621 - protein, 10 aa, synthetic construct
AHLRGDQSTL

SEQ ID NO: 122622 - protein, 10 aa, synthetic construct
AHIRGDQSTL

SEQ ID NO: 122623 - protein, 10 aa, synthetic construct
AHMRGDQSTL

SEQ ID NO: 122624 - protein, 10 aa, synthetic construct
AHWRGDQSTL

SEQ ID NO: 122625 - protein, 10 aa, synthetic construct
AHFRGDQSTL

SEQ ID NO: 122626 - protein, 10 aa, synthetic construct
AHKRGDQSTL

SEQ ID NO: 122627 - protein, 10 aa, synthetic construct
AHRRGDQSTL

SEQ ID NO: 122628 - protein, 10 aa, synthetic construct
AHHRGDQSTL

SEQ ID NO: 122629 - protein, 10 aa, synthetic construct
AHSRGDQSTL

SEQ ID NO: 122630 - protein, 10 aa, synthetic construct
AHTRGDQSTL

SEQ ID NO: 122631 - protein, 10 aa, synthetic construct
AHYRGDQSTL

SEQ ID NO: 122632 - protein, 10 aa, synthetic construct
AHNRGDQSTL

SEQ ID NO: 122633 - protein, 10 aa, synthetic construct
AHQRGDQSTL

SEQ ID NO: 122634 - protein, 10 aa, synthetic construct
AHDRGDQSTL

SEQ ID NO: 122635 - protein, 10 aa, synthetic construct
AHERGDQSTL

SEQ ID NO: 122636 - protein, 10 aa, synthetic construct
ASGRGDQSTL

SEQ ID NO: 122637 - protein, 10 aa, synthetic construct
ASARGDQSTL

SEQ ID NO: 122638 - protein, 10 aa, synthetic construct
ASVRGDQSTL

SEQ ID NO: 122639 - protein, 10 aa, synthetic construct
ASPRGDQSTL

SEQ ID NO: 122640 - protein, 10 aa, synthetic construct
ASLRGDQSTL

SEQ ID NO: 122641 - protein, 10 aa, synthetic construct
ASIRGDQSTL

SEQ ID NO: 122642 - protein, 10 aa, synthetic construct
ASMRGDQSTL

SEQ ID NO: 122643 - protein, 10 aa, synthetic construct
ASWRGDQSTL

SEQ ID NO: 122644 - protein, 10 aa, synthetic construct
ASFRGDQSTL

SEQ ID NO: 122645 - protein, 10 aa, synthetic construct
ASKRGDQSTL

SEQ ID NO: 122646 - protein, 10 aa, synthetic construct
ASRRGDQSTL

SEQ ID NO: 122647 - protein, 10 aa, synthetic construct
ASHRGDQSTL

SEQ ID NO: 122648 - protein, 10 aa, synthetic construct
ASSRGDQSTL

SEQ ID NO: 122649 - protein, 10 aa, synthetic construct
ASTRGDQSTL

SEQ ID NO: 122650 - protein, 10 aa, synthetic construct
ASYRGDQSTL

SEQ ID NO: 122651 - protein, 10 aa, synthetic construct
ASNRGDQSTL

SEQ ID NO: 122652 - protein, 10 aa, synthetic construct
ASQRGDQSTL

SEQ ID NO: 122653 - protein, 10 aa, synthetic construct
ASDRGDQSTL

SEQ ID NO: 122654 - protein, 10 aa, synthetic construct
ASERGDQSTL

SEQ ID NO: 122655 - protein, 10 aa, synthetic construct
ATGRGDQSTL

SEQ ID NO: 122656 - protein, 10 aa, synthetic construct
ATARGDQSTL

SEQ ID NO: 122657 - protein, 10 aa, synthetic construct
ATVRGDQSTL

SEQ ID NO: 122658 - protein, 10 aa, synthetic construct
ATPRGDQSTL

SEQ ID NO: 122659 - protein, 10 aa, synthetic construct
ATLRGDQSTL

SEQ ID NO: 122660 - protein, 10 aa, synthetic construct
ATIRGDQSTL

SEQ ID NO: 122661 - protein, 10 aa, synthetic construct
ATMRGDQSTL

SEQ ID NO: 122662 - protein, 10 aa, synthetic construct
ATWRGDQSTL

SEQ ID NO: 122663 - protein, 10 aa, synthetic construct
ATFRGDQSTL

SEQ ID NO: 122664 - protein, 10 aa, synthetic construct
ATKRGDQSTL

SEQ ID NO: 122665 - protein, 10 aa, synthetic construct
ATRRGDQSTL

SEQ ID NO: 122666 - protein, 10 aa, synthetic construct
ATHRGDQSTL

SEQ ID NO: 122667 - protein, 10 aa, synthetic construct
ATSRGDQSTL

SEQ ID NO: 122668 - protein, 10 aa, synthetic construct
ATTRGDQSTL

SEQ ID NO: 122669 - protein, 10 aa, synthetic construct
ATYRGDQSTL

SEQ ID NO: 122670 - protein, 10 aa, synthetic construct
ATNRGDQSTL

SEQ ID NO: 122671 - protein, 10 aa, synthetic construct
ATQRGDQSTL

SEQ ID NO: 122672 - protein, 10 aa, synthetic construct
ATDRGDQSTL

SEQ ID NO: 122673 - protein, 10 aa, synthetic construct
ATERGDQSTL

SEQ ID NO: 122674 - protein, 10 aa, synthetic construct
AYGRGDQSTL

SEQ ID NO: 122675 - protein, 10 aa, synthetic construct
AYARGDQSTL

SEQ ID NO: 122676 - protein, 10 aa, synthetic construct
AYVRGDQSTL

SEQ ID NO: 122677 - protein, 10 aa, synthetic construct
AYPRGDQSTL

SEQ ID NO: 122678 - protein, 10 aa, synthetic construct
AYLRGDQSTL

SEQ ID NO: 122679 - protein, 10 aa, synthetic construct
AYIRGDQSTL

SEQ ID NO: 122680 - protein, 10 aa, synthetic construct
AYMRGDQSTL

SEQ ID NO: 122681 - protein, 10 aa, synthetic construct
AYWRGDQSTL

SEQ ID NO: 122682 - protein, 10 aa, synthetic construct
AYFRGDQSTL

SEQ ID NO: 122683 - protein, 10 aa, synthetic construct
AYKRGDQSTL

SEQ ID NO: 122684 - protein, 10 aa, synthetic construct
AYRRGDQSTL

SEQ ID NO: 122685 - protein, 10 aa, synthetic construct
AYHRGDQSTL

SEQ ID NO: 122686 - protein, 10 aa, synthetic construct
AYSRGDQSTL

SEQ ID NO: 122687 - protein, 10 aa, synthetic construct
AYTRGDQSTL

SEQ ID NO: 122688 - protein, 10 aa, synthetic construct
AYYRGDQSTL

SEQ ID NO: 122689 - protein, 10 aa, synthetic construct
AYNRGDQSTL

SEQ ID NO: 122690 - protein, 10 aa, synthetic construct
AYQRGDQSTL

SEQ ID NO: 122691 - protein, 10 aa, synthetic construct
AYDRGDQSTL

SEQ ID NO: 122692 - protein, 10 aa, synthetic construct
AYERGDQSTL

SEQ ID NO: 122693 - protein, 10 aa, synthetic construct
ANGRGDQSTL

SEQ ID NO: 122694 - protein, 10 aa, synthetic construct
ANARGDQSTL

SEQ ID NO: 122695 - protein, 10 aa, synthetic construct
ANVRGDQSTL

SEQ ID NO: 122696 - protein, 10 aa, synthetic construct
ANPRGDQSTL

SEQ ID NO: 122697 - protein, 10 aa, synthetic construct
ANLRGDQSTL

SEQ ID NO: 122698 - protein, 10 aa, synthetic construct
ANIRGDQSTL

SEQ ID NO: 122699 - protein, 10 aa, synthetic construct
ANMRGDQSTL

SEQ ID NO: 122700 - protein, 10 aa, synthetic construct
ANWRGDQSTL

SEQ ID NO: 122701 - protein, 10 aa, synthetic construct
ANFRGDQSTL

SEQ ID NO: 122702 - protein, 10 aa, synthetic construct
ANKRGDQSTL

SEQ ID NO: 122703 - protein, 10 aa, synthetic construct
ANRRGDQSTL

SEQ ID NO: 122704 - protein, 10 aa, synthetic construct
ANHRGDQSTL

SEQ ID NO: 122705 - protein, 10 aa, synthetic construct
ANSRGDQSTL

SEQ ID NO: 122706 - protein, 10 aa, synthetic construct
ANTRGDQSTL

SEQ ID NO: 122707 - protein, 10 aa, synthetic construct
ANYRGDQSTL

SEQ ID NO: 122708 - protein, 10 aa, synthetic construct
ANNRGDQSTL

SEQ ID NO: 122709 - protein, 10 aa, synthetic construct
ANQRGDQSTL

SEQ ID NO: 122710 - protein, 10 aa, synthetic construct
ANDRGDQSTL

SEQ ID NO: 122711 - protein, 10 aa, synthetic construct
ANERGDQSTL

SEQ ID NO: 122712 - protein, 10 aa, synthetic construct
AQGRGDQSTL

SEQ ID NO: 122713 - protein, 10 aa, synthetic construct
AQARGDQSTL

SEQ ID NO: 122714 - protein, 10 aa, synthetic construct
AQVRGDQSTL

SEQ ID NO: 122715 - protein, 10 aa, synthetic construct
AQPRGDQSTL

SEQ ID NO: 122716 - protein, 10 aa, synthetic construct
AQLRGDQSTL

SEQ ID NO: 122717 - protein, 10 aa, synthetic construct
AQIRGDQSTL

SEQ ID NO: 122718 - protein, 10 aa, synthetic construct
AQMRGDQSTL

SEQ ID NO: 122719 - protein, 10 aa, synthetic construct
AQWRGDQSTL

SEQ ID NO: 122720 - protein, 10 aa, synthetic construct
AQFRGDQSTL

SEQ ID NO: 122721 - protein, 10 aa, synthetic construct
AQKRGDQSTL

SEQ ID NO: 122722 - protein, 10 aa, synthetic construct
AQRRGDQSTL

SEQ ID NO: 122723 - protein, 10 aa, synthetic construct
AQHRGDQSTL

SEQ ID NO: 122724 - protein, 10 aa, synthetic construct
AQSRGDQSTL

SEQ ID NO: 122725 - protein, 10 aa, synthetic construct
AQTRGDQSTL

SEQ ID NO: 122726 - protein, 10 aa, synthetic construct
AQYRGDQSTL

SEQ ID NO: 122727 - protein, 10 aa, synthetic construct
AQNRGDQSTL

SEQ ID NO: 122728 - protein, 10 aa, synthetic construct
AQQRGDQSTL

SEQ ID NO: 122729 - protein, 10 aa, synthetic construct
AQDRGDQSTL

SEQ ID NO: 122730 - protein, 10 aa, synthetic construct
AQERGDQSTL

SEQ ID NO: 122731 - protein, 10 aa, synthetic construct
ADGRGDQSTL

SEQ ID NO: 122732 - protein, 10 aa, synthetic construct
ADARGDQSTL

SEQ ID NO: 122733 - protein, 10 aa, synthetic construct
ADVRGDQSTL

SEQ ID NO: 122734 - protein, 10 aa, synthetic construct
ADPRGDQSTL

SEQ ID NO: 122735 - protein, 10 aa, synthetic construct
ADLRGDQSTL

SEQ ID NO: 122736 - protein, 10 aa, synthetic construct
ADIRGDQSTL

SEQ ID NO: 122737 - protein, 10 aa, synthetic construct
ADMRGDQSTL

SEQ ID NO: 122738 - protein, 10 aa, synthetic construct
ADWRGDQSTL

SEQ ID NO: 122739 - protein, 10 aa, synthetic construct
ADFRGDQSTL

SEQ ID NO: 122740 - protein, 10 aa, synthetic construct
ADKRGDQSTL

SEQ ID NO: 122741 - protein, 10 aa, synthetic construct
ADRRGDQSTL

SEQ ID NO: 122742 - protein, 10 aa, synthetic construct
ADHRGDQSTL

SEQ ID NO: 122743 - protein, 10 aa, synthetic construct
ADSRGDQSTL

SEQ ID NO: 122744 - protein, 10 aa, synthetic construct
ADTRGDQSTL

SEQ ID NO: 122745 - protein, 10 aa, synthetic construct
ADYRGDQSTL

SEQ ID NO: 122746 - protein, 10 aa, synthetic construct
ADNRGDQSTL

SEQ ID NO: 122747 - protein, 10 aa, synthetic construct
ADQRGDQSTL

SEQ ID NO: 122748 - protein, 10 aa, synthetic construct
ADDRGDQSTL

SEQ ID NO: 122749 - protein, 10 aa, synthetic construct
ADERGDQSTL

SEQ ID NO: 122750 - protein, 10 aa, synthetic construct
AEGRGDQSTL

SEQ ID NO: 122751 - protein, 10 aa, synthetic construct
AEARGDQSTL

SEQ ID NO: 122752 - protein, 10 aa, synthetic construct
AEVRGDQSTL

SEQ ID NO: 122753 - protein, 10 aa, synthetic construct
AEPRGDQSTL

SEQ ID NO: 122754 - protein, 10 aa, synthetic construct
AELRGDQSTL

SEQ ID NO: 122755 - protein, 10 aa, synthetic construct
AEIRGDQSTL

SEQ ID NO: 122756 - protein, 10 aa, synthetic construct
AEMRGDQSTL

SEQ ID NO: 122757 - protein, 10 aa, synthetic construct
AEWRGDQSTL

SEQ ID NO: 122758 - protein, 10 aa, synthetic construct
AEFRGDQSTL

SEQ ID NO: 122759 - protein, 10 aa, synthetic construct
AEKRGDQSTL

SEQ ID NO: 122760 - protein, 10 aa, synthetic construct
AERRGDQSTL

SEQ ID NO: 122761 - protein, 10 aa, synthetic construct
AEHRGDQSTL

SEQ ID NO: 122762 - protein, 10 aa, synthetic construct
AESRGDQSTL

SEQ ID NO: 122763 - protein, 10 aa, synthetic construct
AETRGDQSTL

SEQ ID NO: 122764 - protein, 10 aa, synthetic construct
AEYRGDQSTL

SEQ ID NO: 122765 - protein, 10 aa, synthetic construct
AENRGDQSTL

SEQ ID NO: 122766 - protein, 10 aa, synthetic construct
AEQRGDQSTL

SEQ ID NO: 122767 - protein, 10 aa, synthetic construct
AEDRGDQSTL

SEQ ID NO: 122768 - protein, 10 aa, synthetic construct
AEERGDQSTL

SEQ ID NO: 122769 - protein, 10 aa, synthetic construct
EGGRGDQSTL

SEQ ID NO: 122770 - protein, 10 aa, synthetic construct
EGARGDQSTL

SEQ ID NO: 122771 - protein, 10 aa, synthetic construct
EGVRGDQSTL

SEQ ID NO: 122772 - protein, 10 aa, synthetic construct
EGPRGDQSTL

SEQ ID NO: 122773 - protein, 10 aa, synthetic construct
EGLRGDQSTL

SEQ ID NO: 122774 - protein, 10 aa, synthetic construct
EGIRGDQSTL

SEQ ID NO: 122775 - protein, 10 aa, synthetic construct
EGMRGDQSTL

SEQ ID NO: 122776 - protein, 10 aa, synthetic construct
EGWRGDQSTL

SEQ ID NO: 122777 - protein, 10 aa, synthetic construct
EGFRGDQSTL

SEQ ID NO: 122778 - protein, 10 aa, synthetic construct
EGKRGDQSTL

SEQ ID NO: 122779 - protein, 10 aa, synthetic construct
EGRRGDQSTL

SEQ ID NO: 122780 - protein, 10 aa, synthetic construct
EGHRGDQSTL

SEQ ID NO: 122781 - protein, 10 aa, synthetic construct
EGSRGDQSTL

SEQ ID NO: 122782 - protein, 10 aa, synthetic construct
EGTRGDQSTL

SEQ ID NO: 122783 - protein, 10 aa, synthetic construct
EGYRGDQSTL

SEQ ID NO: 122784 - protein, 10 aa, synthetic construct
EGNRGDQSTL

SEQ ID NO: 122785 - protein, 10 aa, synthetic construct
EGQRGDQSTL

SEQ ID NO: 122786 - protein, 10 aa, synthetic construct
EGDRGDQSTL

SEQ ID NO: 122787 - protein, 10 aa, synthetic construct
EGERGDQSTL

SEQ ID NO: 122788 - protein, 10 aa, synthetic construct
EAGRGDQSTL

SEQ ID NO: 122789 - protein, 10 aa, synthetic construct
EAARGDQSTL

SEQ ID NO: 122790 - protein, 10 aa, synthetic construct
EAVRGDQSTL

SEQ ID NO: 122791 - protein, 10 aa, synthetic construct
EAPRGDQSTL

SEQ ID NO: 122792 - protein, 10 aa, synthetic construct
EALRGDQSTL

SEQ ID NO: 122793 - protein, 10 aa, synthetic construct
EAIRGDQSTL

SEQ ID NO: 122794 - protein, 10 aa, synthetic construct
EAMRGDQSTL

SEQ ID NO: 122795 - protein, 10 aa, synthetic construct
EAWRGDQSTL

SEQ ID NO: 122796 - protein, 10 aa, synthetic construct
EAFRGDQSTL

SEQ ID NO: 122797 - protein, 10 aa, synthetic construct
EAKRGDQSTL

SEQ ID NO: 122798 - protein, 10 aa, synthetic construct
EARRGDQSTL

SEQ ID NO: 122799 - protein, 10 aa, synthetic construct
EAHRGDQSTL

SEQ ID NO: 122800 - protein, 10 aa, synthetic construct
EASRGDQSTL

SEQ ID NO: 122801 - protein, 10 aa, synthetic construct
EATRGDQSTL

SEQ ID NO: 122802 - protein, 10 aa, synthetic construct
EAYRGDQSTL

SEQ ID NO: 122803 - protein, 10 aa, synthetic construct
EANRGDQSTL

SEQ ID NO: 122804 - protein, 10 aa, synthetic construct
EAQRGDQSTL

SEQ ID NO: 122805 - protein, 10 aa, synthetic construct
EADRGDQSTL

SEQ ID NO: 122806 - protein, 10 aa, synthetic construct
EAERGDQSTL

SEQ ID NO: 122807 - protein, 10 aa, synthetic construct
EVGRGDQSTL

SEQ ID NO: 122808 - protein, 10 aa, synthetic construct
EVARGDQSTL

SEQ ID NO: 122809 - protein, 10 aa, synthetic construct
EVVRGDQSTL

SEQ ID NO: 122810 - protein, 10 aa, synthetic construct
EVPRGDQSTL

SEQ ID NO: 122811 - protein, 10 aa, synthetic construct
EVLRGDQSTL

SEQ ID NO: 122812 - protein, 10 aa, synthetic construct
EVIRGDQSTL

SEQ ID NO: 122813 - protein, 10 aa, synthetic construct
EVMRGDQSTL

SEQ ID NO: 122814 - protein, 10 aa, synthetic construct
EVWRGDQSTL

SEQ ID NO: 122815 - protein, 10 aa, synthetic construct
EVFRGDQSTL

SEQ ID NO: 122816 - protein, 10 aa, synthetic construct
EVKRGDQSTL

SEQ ID NO: 122817 - protein, 10 aa, synthetic construct
EVRRGDQSTL

SEQ ID NO: 122818 - protein, 10 aa, synthetic construct
EVHRGDQSTL

SEQ ID NO: 122819 - protein, 10 aa, synthetic construct
EVSRGDQSTL

SEQ ID NO: 122820 - protein, 10 aa, synthetic construct
EVTRGDQSTL

SEQ ID NO: 122821 - protein, 10 aa, synthetic construct
EVYRGDQSTL

SEQ ID NO: 122822 - protein, 10 aa, synthetic construct
EVNRGDQSTL

SEQ ID NO: 122823 - protein, 10 aa, synthetic construct
EVQRGDQSTL

SEQ ID NO: 122824 - protein, 10 aa, synthetic construct
EVDRGDQSTL

SEQ ID NO: 122825 - protein, 10 aa, synthetic construct
EVERGDQSTL

SEQ ID NO: 122826 - protein, 10 aa, synthetic construct
EPGRGDQSTL

SEQ ID NO: 122827 - protein, 10 aa, synthetic construct
EPARGDQSTL

SEQ ID NO: 122828 - protein, 10 aa, synthetic construct
EPVRGDQSTL

SEQ ID NO: 122829 - protein, 10 aa, synthetic construct
EPPRGDQSTL

SEQ ID NO: 122830 - protein, 10 aa, synthetic construct
EPLRGDQSTL

SEQ ID NO: 122831 - protein, 10 aa, synthetic construct
EPIRGDQSTL

SEQ ID NO: 122832 - protein, 10 aa, synthetic construct
EPMRGDQSTL

SEQ ID NO: 122833 - protein, 10 aa, synthetic construct
EPWRGDQSTL

SEQ ID NO: 122834 - protein, 10 aa, synthetic construct
EPFRGDQSTL

SEQ ID NO: 122835 - protein, 10 aa, synthetic construct
EPKRGDQSTL

SEQ ID NO: 122836 - protein, 10 aa, synthetic construct
EPRRGDQSTL

SEQ ID NO: 122837 - protein, 10 aa, synthetic construct
EPHRGDQSTL

SEQ ID NO: 122838 - protein, 10 aa, synthetic construct
EPSRGDQSTL

SEQ ID NO: 122839 - protein, 10 aa, synthetic construct
EPTRGDQSTL

SEQ ID NO: 122840 - protein, 10 aa, synthetic construct
EPYRGDQSTL

SEQ ID NO: 122841 - protein, 10 aa, synthetic construct
EPNRGDQSTL

SEQ ID NO: 122842 - protein, 10 aa, synthetic construct
EPQRGDQSTL

SEQ ID NO: 122843 - protein, 10 aa, synthetic construct
EPDRGDQSTL

SEQ ID NO: 122844 - protein, 10 aa, synthetic construct
EPERGDQSTL

SEQ ID NO: 122845 - protein, 10 aa, synthetic construct
ELGRGDQSTL

SEQ ID NO: 122846 - protein, 10 aa, synthetic construct
ELARGDQSTL

SEQ ID NO: 122847 - protein, 10 aa, synthetic construct
ELVRGDQSTL

SEQ ID NO: 122848 - protein, 10 aa, synthetic construct
ELPRGDQSTL

SEQ ID NO: 122849 - protein, 10 aa, synthetic construct
ELLRGDQSTL

SEQ ID NO: 122850 - protein, 10 aa, synthetic construct
ELIRGDQSTL

SEQ ID NO: 122851 - protein, 10 aa, synthetic construct
ELMRGDQSTL

SEQ ID NO: 122852 - protein, 10 aa, synthetic construct
ELWRGDQSTL

SEQ ID NO: 122853 - protein, 10 aa, synthetic construct
ELFRGDQSTL

SEQ ID NO: 122854 - protein, 10 aa, synthetic construct
ELKRGDQSTL

SEQ ID NO: 122855 - protein, 10 aa, synthetic construct
ELRRGDQSTL

SEQ ID NO: 122856 - protein, 10 aa, synthetic construct
ELHRGDQSTL

SEQ ID NO: 122857 - protein, 10 aa, synthetic construct
ELSRGDQSTL

SEQ ID NO: 122858 - protein, 10 aa, synthetic construct
ELTRGDQSTL

SEQ ID NO: 122859 - protein, 10 aa, synthetic construct
ELYRGDQSTL

SEQ ID NO: 122860 - protein, 10 aa, synthetic construct
ELNRGDQSTL

SEQ ID NO: 122861 - protein, 10 aa, synthetic construct
ELQRGDQSTL

SEQ ID NO: 122862 - protein, 10 aa, synthetic construct
ELDRGDQSTL

SEQ ID NO: 122863 - protein, 10 aa, synthetic construct
ELERGDQSTL

SEQ ID NO: 122864 - protein, 10 aa, synthetic construct
EIGRGDQSTL

SEQ ID NO: 122865 - protein, 10 aa, synthetic construct
EIARGDQSTL

SEQ ID NO: 122866 - protein, 10 aa, synthetic construct
EIVRGDQSTL

SEQ ID NO: 122867 - protein, 10 aa, synthetic construct
EIPRGDQSTL

SEQ ID NO: 122868 - protein, 10 aa, synthetic construct
EILRGDQSTL

SEQ ID NO: 122869 - protein, 10 aa, synthetic construct
EIIRGDQSTL

SEQ ID NO: 122870 - protein, 10 aa, synthetic construct
EIMRGDQSTL

SEQ ID NO: 122871 - protein, 10 aa, synthetic construct
EIWRGDQSTL

SEQ ID NO: 122872 - protein, 10 aa, synthetic construct
EIFRGDQSTL

SEQ ID NO: 122873 - protein, 10 aa, synthetic construct
EIKRGDQSTL

SEQ ID NO: 122874 - protein, 10 aa, synthetic construct
EIRRGDQSTL

SEQ ID NO: 122875 - protein, 10 aa, synthetic construct
EIHRGDQSTL

SEQ ID NO: 122876 - protein, 10 aa, synthetic construct
EISRGDQSTL

SEQ ID NO: 122877 - protein, 10 aa, synthetic construct
EITRGDQSTL

SEQ ID NO: 122878 - protein, 10 aa, synthetic construct
EIYRGDQSTL

SEQ ID NO: 122879 - protein, 10 aa, synthetic construct
EINRGDQSTL

SEQ ID NO: 122880 - protein, 10 aa, synthetic construct
EIQRGDQSTL

SEQ ID NO: 122881 - protein, 10 aa, synthetic construct
EIDRGDQSTL

SEQ ID NO: 122882 - protein, 10 aa, synthetic construct
EIERGDQSTL

SEQ ID NO: 122883 - protein, 10 aa, synthetic construct
EMGRGDQSTL

SEQ ID NO: 122884 - protein, 10 aa, synthetic construct
EMARGDQSTL

SEQ ID NO: 122885 - protein, 10 aa, synthetic construct
EMVRGDQSTL

SEQ ID NO: 122886 - protein, 10 aa, synthetic construct
EMPRGDQSTL

SEQ ID NO: 122887 - protein, 10 aa, synthetic construct
EMLRGDQSTL

SEQ ID NO: 122888 - protein, 10 aa, synthetic construct
EMIRGDQSTL

SEQ ID NO: 122889 - protein, 10 aa, synthetic construct
EMMRGDQSTL

SEQ ID NO: 122890 - protein, 10 aa, synthetic construct
EMWRGDQSTL

SEQ ID NO: 122891 - protein, 10 aa, synthetic construct
EMFRGDQSTL

SEQ ID NO: 122892 - protein, 10 aa, synthetic construct
EMKRGDQSTL

SEQ ID NO: 122893 - protein, 10 aa, synthetic construct
EMRRGDQSTL

SEQ ID NO: 122894 - protein, 10 aa, synthetic construct
EMHRGDQSTL

SEQ ID NO: 122895 - protein, 10 aa, synthetic construct
EMSRGDQSTL

SEQ ID NO: 122896 - protein, 10 aa, synthetic construct
EMTRGDQSTL

SEQ ID NO: 122897 - protein, 10 aa, synthetic construct
EMYRGDQSTL

SEQ ID NO: 122898 - protein, 10 aa, synthetic construct
EMNRGDQSTL

SEQ ID NO: 122899 - protein, 10 aa, synthetic construct
EMQRGDQSTL

SEQ ID NO: 122900 - protein, 10 aa, synthetic construct
EMDRGDQSTL

SEQ ID NO: 122901 - protein, 10 aa, synthetic construct
EMERGDQSTL

SEQ ID NO: 122902 - protein, 10 aa, synthetic construct
EWGRGDQSTL

SEQ ID NO: 122903 - protein, 10 aa, synthetic construct
EWARGDQSTL

SEQ ID NO: 122904 - protein, 10 aa, synthetic construct
EWVRGDQSTL

SEQ ID NO: 122905 - protein, 10 aa, synthetic construct
EWPRGDQSTL

SEQ ID NO: 122906 - protein, 10 aa, synthetic construct
EWLRGDQSTL

SEQ ID NO: 122907 - protein, 10 aa, synthetic construct
EWIRGDQSTL

SEQ ID NO: 122908 - protein, 10 aa, synthetic construct
EWMRGDQSTL

SEQ ID NO: 122909 - protein, 10 aa, synthetic construct
EWWRGDQSTL

SEQ ID NO: 122910 - protein, 10 aa, synthetic construct
EWFRGDQSTL

SEQ ID NO: 122911 - protein, 10 aa, synthetic construct
EWKRGDQSTL

SEQ ID NO: 122912 - protein, 10 aa, synthetic construct
EWRRGDQSTL

SEQ ID NO: 122913 - protein, 10 aa, synthetic construct
EWHRGDQSTL

SEQ ID NO: 122914 - protein, 10 aa, synthetic construct
EWSRGDQSTL

SEQ ID NO: 122915 - protein, 10 aa, synthetic construct
EWTRGDQSTL

SEQ ID NO: 122916 - protein, 10 aa, synthetic construct
EWYRGDQSTL

SEQ ID NO: 122917 - protein, 10 aa, synthetic construct
EWNRGDQSTL

SEQ ID NO: 122918 - protein, 10 aa, synthetic construct
EWQRGDQSTL

SEQ ID NO: 122919 - protein, 10 aa, synthetic construct
EWDRGDQSTL

SEQ ID NO: 122920 - protein, 10 aa, synthetic construct
EWERGDQSTL

SEQ ID NO: 122921 - protein, 10 aa, synthetic construct
EFGRGDQSTL

SEQ ID NO: 122922 - protein, 10 aa, synthetic construct
EFARGDQSTL

SEQ ID NO: 122923 - protein, 10 aa, synthetic construct
EFVRGDQSTL

SEQ ID NO: 122924 - protein, 10 aa, synthetic construct
EFPRGDQSTL

SEQ ID NO: 122925 - protein, 10 aa, synthetic construct
EFLRGDQSTL

SEQ ID NO: 122926 - protein, 10 aa, synthetic construct
EFIRGDQSTL

SEQ ID NO: 122927 - protein, 10 aa, synthetic construct
EFMRGDQSTL

SEQ ID NO: 122928 - protein, 10 aa, synthetic construct
EFWRGDQSTL

SEQ ID NO: 122929 - protein, 10 aa, synthetic construct
EFFRGDQSTL

SEQ ID NO: 122930 - protein, 10 aa, synthetic construct
EFKRGDQSTL

SEQ ID NO: 122931 - protein, 10 aa, synthetic construct
EFRRGDQSTL

SEQ ID NO: 122932 - protein, 10 aa, synthetic construct
EFHRGDQSTL

SEQ ID NO: 122933 - protein, 10 aa, synthetic construct
EFSRGDQSTL

SEQ ID NO: 122934 - protein, 10 aa, synthetic construct
EFTRGDQSTL

SEQ ID NO: 122935 - protein, 10 aa, synthetic construct
EFYRGDQSTL

SEQ ID NO: 122936 - protein, 10 aa, synthetic construct
EFNRGDQSTL

SEQ ID NO: 122937 - protein, 10 aa, synthetic construct
EFQRGDQSTL

SEQ ID NO: 122938 - protein, 10 aa, synthetic construct
EFDRGDQSTL

SEQ ID NO: 122939 - protein, 10 aa, synthetic construct
EFERGDQSTL

SEQ ID NO: 122940 - protein, 10 aa, synthetic construct
EKGRGDQSTL

SEQ ID NO: 122941 - protein, 10 aa, synthetic construct
EKARGDQSTL

SEQ ID NO: 122942 - protein, 10 aa, synthetic construct
EKVRGDQSTL

SEQ ID NO: 122943 - protein, 10 aa, synthetic construct
EKPRGDQSTL

SEQ ID NO: 122944 - protein, 10 aa, synthetic construct
EKLRGDQSTL

SEQ ID NO: 122945 - protein, 10 aa, synthetic construct
EKIRGDQSTL

SEQ ID NO: 122946 - protein, 10 aa, synthetic construct
EKMRGDQSTL

SEQ ID NO: 122947 - protein, 10 aa, synthetic construct
EKWRGDQSTL

SEQ ID NO: 122948 - protein, 10 aa, synthetic construct
EKFRGDQSTL

SEQ ID NO: 122949 - protein, 10 aa, synthetic construct
EKKRGDQSTL

SEQ ID NO: 122950 - protein, 10 aa, synthetic construct
EKRRGDQSTL

SEQ ID NO: 122951 - protein, 10 aa, synthetic construct
EKHRGDQSTL

SEQ ID NO: 122952 - protein, 10 aa, synthetic construct
EKSRGDQSTL

SEQ ID NO: 122953 - protein, 10 aa, synthetic construct
EKTRGDQSTL

SEQ ID NO: 122954 - protein, 10 aa, synthetic construct
EKYRGDQSTL

SEQ ID NO: 122955 - protein, 10 aa, synthetic construct
EKNRGDQSTL

SEQ ID NO: 122956 - protein, 10 aa, synthetic construct
EKQRGDQSTL

SEQ ID NO: 122957 - protein, 10 aa, synthetic construct
EKDRGDQSTL

SEQ ID NO: 122958 - protein, 10 aa, synthetic construct
EKERGDQSTL

SEQ ID NO: 122959 - protein, 10 aa, synthetic construct
ERGRGDQSTL

SEQ ID NO: 122960 - protein, 10 aa, synthetic construct
ERARGDQSTL

SEQ ID NO: 122961 - protein, 10 aa, synthetic construct
ERVRGDQSTL

SEQ ID NO: 122962 - protein, 10 aa, synthetic construct
ERPRGDQSTL

SEQ ID NO: 122963 - protein, 10 aa, synthetic construct
ERLRGDQSTL

SEQ ID NO: 122964 - protein, 10 aa, synthetic construct
ERIRGDQSTL

SEQ ID NO: 122965 - protein, 10 aa, synthetic construct
ERMRGDQSTL

SEQ ID NO: 122966 - protein, 10 aa, synthetic construct
ERWRGDQSTL

SEQ ID NO: 122967 - protein, 10 aa, synthetic construct
ERFRGDQSTL

SEQ ID NO: 122968 - protein, 10 aa, synthetic construct
ERKRGDQSTL

SEQ ID NO: 122969 - protein, 10 aa, synthetic construct
ERRRGDQSTL

SEQ ID NO: 122970 - protein, 10 aa, synthetic construct
ERHRGDQSTL

SEQ ID NO: 122971 - protein, 10 aa, synthetic construct
ERSRGDQSTL

SEQ ID NO: 122972 - protein, 10 aa, synthetic construct
ERTRGDQSTL

SEQ ID NO: 122973 - protein, 10 aa, synthetic construct
ERYRGDQSTL

SEQ ID NO: 122974 - protein, 10 aa, synthetic construct
ERNRGDQSTL

SEQ ID NO: 122975 - protein, 10 aa, synthetic construct
ERQRGDQSTL

SEQ ID NO: 122976 - protein, 10 aa, synthetic construct
ERDRGDQSTL

SEQ ID NO: 122977 - protein, 10 aa, synthetic construct
ERERGDQSTL

SEQ ID NO: 122978 - protein, 10 aa, synthetic construct
EHGRGDQSTL

SEQ ID NO: 122979 - protein, 10 aa, synthetic construct
EHARGDQSTL

SEQ ID NO: 122980 - protein, 10 aa, synthetic construct
EHVRGDQSTL

SEQ ID NO: 122981 - protein, 10 aa, synthetic construct
EHPRGDQSTL

SEQ ID NO: 122982 - protein, 10 aa, synthetic construct
EHLRGDQSTL

SEQ ID NO: 122983 - protein, 10 aa, synthetic construct
EHIRGDQSTL

SEQ ID NO: 122984 - protein, 10 aa, synthetic construct
EHMRGDQSTL

SEQ ID NO: 122985 - protein, 10 aa, synthetic construct
EHWRGDQSTL

SEQ ID NO: 122986 - protein, 10 aa, synthetic construct
EHFRGDQSTL

SEQ ID NO: 122987 - protein, 10 aa, synthetic construct
EHKRGDQSTL

SEQ ID NO: 122988 - protein, 10 aa, synthetic construct
EHRRGDQSTL

SEQ ID NO: 122989 - protein, 10 aa, synthetic construct
EHHRGDQSTL

SEQ ID NO: 122990 - protein, 10 aa, synthetic construct
EHSRGDQSTL

SEQ ID NO: 122991 - protein, 10 aa, synthetic construct
EHTRGDQSTL

SEQ ID NO: 122992 - protein, 10 aa, synthetic construct
EHYRGDQSTL

SEQ ID NO: 122993 - protein, 10 aa, synthetic construct
EHNRGDQSTL

SEQ ID NO: 122994 - protein, 10 aa, synthetic construct
EHQRGDQSTL

SEQ ID NO: 122995 - protein, 10 aa, synthetic construct
EHDRGDQSTL

SEQ ID NO: 122996 - protein, 10 aa, synthetic construct
EHERGDQSTL

SEQ ID NO: 122997 - protein, 10 aa, synthetic construct
ESGRGDQSTL

SEQ ID NO: 122998 - protein, 10 aa, synthetic construct
ESARGDQSTL

SEQ ID NO: 122999 - protein, 10 aa, synthetic construct
ESVRGDQSTL

SEQ ID NO: 123000 - protein, 10 aa, synthetic construct
ESPRGDQSTL

SEQ ID NO: 123001 - protein, 10 aa, synthetic construct
ESLRGDQSTL

SEQ ID NO: 123002 - protein, 10 aa, synthetic construct
ESIRGDQSTL

SEQ ID NO: 123003 - protein, 10 aa, synthetic construct
ESMRGDQSTL

SEQ ID NO: 123004 - protein, 10 aa, synthetic construct
ESWRGDQSTL

SEQ ID NO: 123005 - protein, 10 aa, synthetic construct
ESFRGDQSTL

SEQ ID NO: 123006 - protein, 10 aa, synthetic construct
ESKRGDQSTL

SEQ ID NO: 123007 - protein, 10 aa, synthetic construct
ESRRGDQSTL

SEQ ID NO: 123008 - protein, 10 aa, synthetic construct
ESHRGDQSTL

SEQ ID NO: 123009 - protein, 10 aa, synthetic construct
ESSRGDQSTL

SEQ ID NO: 123010 - protein, 10 aa, synthetic construct
ESTRGDQSTL

SEQ ID NO: 123011 - protein, 10 aa, synthetic construct
ESYRGDQSTL

SEQ ID NO: 123012 - protein, 10 aa, synthetic construct
ESNRGDQSTL

SEQ ID NO: 123013 - protein, 10 aa, synthetic construct
ESQRGDQSTL

SEQ ID NO: 123014 - protein, 10 aa, synthetic construct
ESDRGDQSTL

SEQ ID NO: 123015 - protein, 10 aa, synthetic construct
ESERGDQSTL

SEQ ID NO: 123016 - protein, 10 aa, synthetic construct
ETGRGDQSTL

SEQ ID NO: 123017 - protein, 10 aa, synthetic construct
ETARGDQSTL

SEQ ID NO: 123018 - protein, 10 aa, synthetic construct
ETVRGDQSTL

SEQ ID NO: 123019 - protein, 10 aa, synthetic construct
ETPRGDQSTL

SEQ ID NO: 123020 - protein, 10 aa, synthetic construct
ETLRGDQSTL

SEQ ID NO: 123021 - protein, 10 aa, synthetic construct
ETIRGDQSTL

SEQ ID NO: 123022 - protein, 10 aa, synthetic construct
ETMRGDQSTL

SEQ ID NO: 123023 - protein, 10 aa, synthetic construct
ETWRGDQSTL

SEQ ID NO: 123024 - protein, 10 aa, synthetic construct
ETFRGDQSTL

SEQ ID NO: 123025 - protein, 10 aa, synthetic construct
ETKRGDQSTL

SEQ ID NO: 123026 - protein, 10 aa, synthetic construct
ETRRGDQSTL

SEQ ID NO: 123027 - protein, 10 aa, synthetic construct
ETHRGDQSTL

SEQ ID NO: 123028 - protein, 10 aa, synthetic construct
ETSRGDQSTL

SEQ ID NO: 123029 - protein, 10 aa, synthetic construct
ETTRGDQSTL

SEQ ID NO: 123030 - protein, 10 aa, synthetic construct
ETYRGDQSTL

SEQ ID NO: 123031 - protein, 10 aa, synthetic construct
ETNRGDQSTL

SEQ ID NO: 123032 - protein, 10 aa, synthetic construct
ETQRGDQSTL

SEQ ID NO: 123033 - protein, 10 aa, synthetic construct
ETDRGDQSTL

SEQ ID NO: 123034 - protein, 10 aa, synthetic construct
ETERGDQSTL

SEQ ID NO: 123035 - protein, 10 aa, synthetic construct
EYGRGDQSTL

SEQ ID NO: 123036 - protein, 10 aa, synthetic construct
EYARGDQSTL

SEQ ID NO: 123037 - protein, 10 aa, synthetic construct
EYVRGDQSTL

SEQ ID NO: 123038 - protein, 10 aa, synthetic construct
EYPRGDQSTL

SEQ ID NO: 123039 - protein, 10 aa, synthetic construct
EYLRGDQSTL

SEQ ID NO: 123040 - protein, 10 aa, synthetic construct
EYIRGDQSTL

SEQ ID NO: 123041 - protein, 10 aa, synthetic construct
EYMRGDQSTL

SEQ ID NO: 123042 - protein, 10 aa, synthetic construct
EYWRGDQSTL

SEQ ID NO: 123043 - protein, 10 aa, synthetic construct
EYFRGDQSTL

SEQ ID NO: 123044 - protein, 10 aa, synthetic construct
EYKRGDQSTL

SEQ ID NO: 123045 - protein, 10 aa, synthetic construct
EYRRGDQSTL

SEQ ID NO: 123046 - protein, 10 aa, synthetic construct
EYHRGDQSTL

SEQ ID NO: 123047 - protein, 10 aa, synthetic construct
EYSRGDQSTL

SEQ ID NO: 123048 - protein, 10 aa, synthetic construct
EYTRGDQSTL

SEQ ID NO: 123049 - protein, 10 aa, synthetic construct
EYYRGDQSTL

SEQ ID NO: 123050 - protein, 10 aa, synthetic construct
EYNRGDQSTL

SEQ ID NO: 123051 - protein, 10 aa, synthetic construct
EYQRGDQSTL

SEQ ID NO: 123052 - protein, 10 aa, synthetic construct
EYDRGDQSTL

SEQ ID NO: 123053 - protein, 10 aa, synthetic construct
EYERGDQSTL

SEQ ID NO: 123054 - protein, 10 aa, synthetic construct
ENGRGDQSTL

SEQ ID NO: 123055 - protein, 10 aa, synthetic construct
ENARGDQSTL

SEQ ID NO: 123056 - protein, 10 aa, synthetic construct
ENVRGDQSTL

SEQ ID NO: 123057 - protein, 10 aa, synthetic construct
ENPRGDQSTL

SEQ ID NO: 123058 - protein, 10 aa, synthetic construct
ENLRGDQSTL

SEQ ID NO: 123059 - protein, 10 aa, synthetic construct
ENIRGDQSTL

SEQ ID NO: 123060 - protein, 10 aa, synthetic construct
ENMRGDQSTL

SEQ ID NO: 123061 - protein, 10 aa, synthetic construct
ENWRGDQSTL

SEQ ID NO: 123062 - protein, 10 aa, synthetic construct
ENFRGDQSTL

SEQ ID NO: 123063 - protein, 10 aa, synthetic construct
ENKRGDQSTL

SEQ ID NO: 123064 - protein, 10 aa, synthetic construct
ENRRGDQSTL

SEQ ID NO: 123065 - protein, 10 aa, synthetic construct
ENHRGDQSTL

SEQ ID NO: 123066 - protein, 10 aa, synthetic construct
ENSRGDQSTL

SEQ ID NO: 123067 - protein, 10 aa, synthetic construct
ENTRGDQSTL

SEQ ID NO: 123068 - protein, 10 aa, synthetic construct
ENYRGDQSTL

SEQ ID NO: 123069 - protein, 10 aa, synthetic construct
ENNRGDQSTL

SEQ ID NO: 123070 - protein, 10 aa, synthetic construct
ENQRGDQSTL

SEQ ID NO: 123071 - protein, 10 aa, synthetic construct
ENDRGDQSTL

SEQ ID NO: 123072 - protein, 10 aa, synthetic construct
ENERGDQSTL

SEQ ID NO: 123073 - protein, 10 aa, synthetic construct
EQGRGDQSTL

SEQ ID NO: 123074 - protein, 10 aa, synthetic construct
EQARGDQSTL

SEQ ID NO: 123075 - protein, 10 aa, synthetic construct
EQVRGDQSTL

SEQ ID NO: 123076 - protein, 10 aa, synthetic construct
EQPRGDQSTL

SEQ ID NO: 123077 - protein, 10 aa, synthetic construct
EQLRGDQSTL

SEQ ID NO: 123078 - protein, 10 aa, synthetic construct
EQIRGDQSTL

SEQ ID NO: 123079 - protein, 10 aa, synthetic construct
EQMRGDQSTL

SEQ ID NO: 123080 - protein, 10 aa, synthetic construct
EQWRGDQSTL

SEQ ID NO: 123081 - protein, 10 aa, synthetic construct
EQFRGDQSTL

SEQ ID NO: 123082 - protein, 10 aa, synthetic construct
EQKRGDQSTL

SEQ ID NO: 123083 - protein, 10 aa, synthetic construct
EQRRGDQSTL

SEQ ID NO: 123084 - protein, 10 aa, synthetic construct
EQHRGDQSTL

SEQ ID NO: 123085 - protein, 10 aa, synthetic construct
EQSRGDQSTL

SEQ ID NO: 123086 - protein, 10 aa, synthetic construct
EQTRGDQSTL

SEQ ID NO: 123087 - protein, 10 aa, synthetic construct
EQYRGDQSTL

SEQ ID NO: 123088 - protein, 10 aa, synthetic construct
EQNRGDQSTL

SEQ ID NO: 123089 - protein, 10 aa, synthetic construct
EQQRGDQSTL

SEQ ID NO: 123090 - protein, 10 aa, synthetic construct
EQDRGDQSTL

SEQ ID NO: 123091 - protein, 10 aa, synthetic construct
EQERGDQSTL

SEQ ID NO: 123092 - protein, 10 aa, synthetic construct
EDGRGDQSTL

SEQ ID NO: 123093 - protein, 10 aa, synthetic construct
EDARGDQSTL

SEQ ID NO: 123094 - protein, 10 aa, synthetic construct
EDVRGDQSTL

SEQ ID NO: 123095 - protein, 10 aa, synthetic construct
EDPRGDQSTL

SEQ ID NO: 123096 - protein, 10 aa, synthetic construct
EDLRGDQSTL

SEQ ID NO: 123097 - protein, 10 aa, synthetic construct
EDIRGDQSTL

SEQ ID NO: 123098 - protein, 10 aa, synthetic construct
EDMRGDQSTL

SEQ ID NO: 123099 - protein, 10 aa, synthetic construct
EDWRGDQSTL

SEQ ID NO: 123100 - protein, 10 aa, synthetic construct
EDFRGDQSTL

SEQ ID NO: 123101 - protein, 10 aa, synthetic construct
EDKRGDQSTL

SEQ ID NO: 123102 - protein, 10 aa, synthetic construct
EDRRGDQSTL

SEQ ID NO: 123103 - protein, 10 aa, synthetic construct
EDHRGDQSTL

SEQ ID NO: 123104 - protein, 10 aa, synthetic construct
EDSRGDQSTL

SEQ ID NO: 123105 - protein, 10 aa, synthetic construct
EDTRGDQSTL

SEQ ID NO: 123106 - protein, 10 aa, synthetic construct
EDYRGDQSTL

SEQ ID NO: 123107 - protein, 10 aa, synthetic construct
EDNRGDQSTL

SEQ ID NO: 123108 - protein, 10 aa, synthetic construct
EDQRGDQSTL

SEQ ID NO: 123109 - protein, 10 aa, synthetic construct
EDDRGDQSTL

SEQ ID NO: 123110 - protein, 10 aa, synthetic construct
EDERGDQSTL

SEQ ID NO: 123111 - protein, 10 aa, synthetic construct
EEGRGDQSTL

SEQ ID NO: 123112 - protein, 10 aa, synthetic construct
EEARGDQSTL

SEQ ID NO: 123113 - protein, 10 aa, synthetic construct
EEVRGDQSTL

SEQ ID NO: 123114 - protein, 10 aa, synthetic construct
EEPRGDQSTL

SEQ ID NO: 123115 - protein, 10 aa, synthetic construct
EELRGDQSTL

SEQ ID NO: 123116 - protein, 10 aa, synthetic construct
EEIRGDQSTL

SEQ ID NO: 123117 - protein, 10 aa, synthetic construct
EEMRGDQSTL

SEQ ID NO: 123118 - protein, 10 aa, synthetic construct
EEWRGDQSTL

SEQ ID NO: 123119 - protein, 10 aa, synthetic construct
EEFRGDQSTL

SEQ ID NO: 123120 - protein, 10 aa, synthetic construct
EEKRGDQSTL

SEQ ID NO: 123121 - protein, 10 aa, synthetic construct
EERRGDQSTL

SEQ ID NO: 123122 - protein, 10 aa, synthetic construct
EEHRGDQSTL

SEQ ID NO: 123123 - protein, 10 aa, synthetic construct
EESRGDQSTL

SEQ ID NO: 123124 - protein, 10 aa, synthetic construct
EETRGDQSTL

SEQ ID NO: 123125 - protein, 10 aa, synthetic construct
EEYRGDQSTL

SEQ ID NO: 123126 - protein, 10 aa, synthetic construct
EENRGDQSTL

SEQ ID NO: 123127 - protein, 10 aa, synthetic construct
EEQRGDQSTL

SEQ ID NO: 123128 - protein, 10 aa, synthetic construct
EEDRGDQSTL

SEQ ID NO: 123129 - protein, 10 aa, synthetic construct
EEERGDQSTL

SEQ ID NO: 123130 - protein, 10 aa, synthetic construct
NGGRGDQSTL

SEQ ID NO: 123131 - protein, 10 aa, synthetic construct
NGARGDQSTL

SEQ ID NO: 123132 - protein, 10 aa, synthetic construct
NGVRGDQSTL

SEQ ID NO: 123133 - protein, 10 aa, synthetic construct
NGPRGDQSTL

SEQ ID NO: 123134 - protein, 10 aa, synthetic construct
NGLRGDQSTL

SEQ ID NO: 123135 - protein, 10 aa, synthetic construct
NGIRGDQSTL

SEQ ID NO: 123136 - protein, 10 aa, synthetic construct
NGMRGDQSTL

SEQ ID NO: 123137 - protein, 10 aa, synthetic construct
NGWRGDQSTL

SEQ ID NO: 123138 - protein, 10 aa, synthetic construct
NGFRGDQSTL

SEQ ID NO: 123139 - protein, 10 aa, synthetic construct
NGKRGDQSTL

SEQ ID NO: 123140 - protein, 10 aa, synthetic construct
NGRRGDQSTL

SEQ ID NO: 123141 - protein, 10 aa, synthetic construct
NGHRGDQSTL

SEQ ID NO: 123142 - protein, 10 aa, synthetic construct
NGSRGDQSTL

SEQ ID NO: 123143 - protein, 10 aa, synthetic construct
NGTRGDQSTL

SEQ ID NO: 123144 - protein, 10 aa, synthetic construct
NGYRGDQSTL

SEQ ID NO: 123145 - protein, 10 aa, synthetic construct
NGNRGDQSTL

SEQ ID NO: 123146 - protein, 10 aa, synthetic construct
NGQRGDQSTL

SEQ ID NO: 123147 - protein, 10 aa, synthetic construct
NGDRGDQSTL

SEQ ID NO: 123148 - protein, 10 aa, synthetic construct
NGERGDQSTL

SEQ ID NO: 123149 - protein, 10 aa, synthetic construct
NAGRGDQSTL

SEQ ID NO: 123150 - protein, 10 aa, synthetic construct
NAARGDQSTL

SEQ ID NO: 123151 - protein, 10 aa, synthetic construct
NAVRGDQSTL

SEQ ID NO: 123152 - protein, 10 aa, synthetic construct
NAPRGDQSTL

SEQ ID NO: 123153 - protein, 10 aa, synthetic construct
NALRGDQSTL

SEQ ID NO: 123154 - protein, 10 aa, synthetic construct
NAIRGDQSTL

SEQ ID NO: 123155 - protein, 10 aa, synthetic construct
NAMRGDQSTL

SEQ ID NO: 123156 - protein, 10 aa, synthetic construct
NAWRGDQSTL

SEQ ID NO: 123157 - protein, 10 aa, synthetic construct
NAFRGDQSTL

SEQ ID NO: 123158 - protein, 10 aa, synthetic construct
NAKRGDQSTL

SEQ ID NO: 123159 - protein, 10 aa, synthetic construct
NARRGDQSTL

SEQ ID NO: 123160 - protein, 10 aa, synthetic construct
NAHRGDQSTL

SEQ ID NO: 123161 - protein, 10 aa, synthetic construct
NASRGDQSTL

SEQ ID NO: 123162 - protein, 10 aa, synthetic construct
NATRGDQSTL

SEQ ID NO: 123163 - protein, 10 aa, synthetic construct
NAYRGDQSTL

SEQ ID NO: 123164 - protein, 10 aa, synthetic construct
NANRGDQSTL

SEQ ID NO: 123165 - protein, 10 aa, synthetic construct
NAQRGDQSTL

SEQ ID NO: 123166 - protein, 10 aa, synthetic construct
NADRGDQSTL

SEQ ID NO: 123167 - protein, 10 aa, synthetic construct
NAERGDQSTL

SEQ ID NO: 123168 - protein, 10 aa, synthetic construct
NVGRGDQSTL

SEQ ID NO: 123169 - protein, 10 aa, synthetic construct
NVARGDQSTL

SEQ ID NO: 123170 - protein, 10 aa, synthetic construct
NVVRGDQSTL

SEQ ID NO: 123171 - protein, 10 aa, synthetic construct
NVPRGDQSTL

SEQ ID NO: 123172 - protein, 10 aa, synthetic construct
NVLRGDQSTL

SEQ ID NO: 123173 - protein, 10 aa, synthetic construct
NVIRGDQSTL

SEQ ID NO: 123174 - protein, 10 aa, synthetic construct
NVMRGDQSTL

SEQ ID NO: 123175 - protein, 10 aa, synthetic construct
NVWRGDQSTL

SEQ ID NO: 123176 - protein, 10 aa, synthetic construct
NVFRGDQSTL

SEQ ID NO: 123177 - protein, 10 aa, synthetic construct
NVKRGDQSTL

SEQ ID NO: 123178 - protein, 10 aa, synthetic construct
NVRRGDQSTL

SEQ ID NO: 123179 - protein, 10 aa, synthetic construct
NVHRGDQSTL

SEQ ID NO: 123180 - protein, 10 aa, synthetic construct
NVSRGDQSTL

SEQ ID NO: 123181 - protein, 10 aa, synthetic construct
NVTRGDQSTL

SEQ ID NO: 123182 - protein, 10 aa, synthetic construct
NVYRGDQSTL

SEQ ID NO: 123183 - protein, 10 aa, synthetic construct
NVNRGDQSTL

SEQ ID NO: 123184 - protein, 10 aa, synthetic construct
NVQRGDQSTL

SEQ ID NO: 123185 - protein, 10 aa, synthetic construct
NVDRGDQSTL

SEQ ID NO: 123186 - protein, 10 aa, synthetic construct
NVERGDQSTL

SEQ ID NO: 123187 - protein, 10 aa, synthetic construct
NPGRGDQSTL

SEQ ID NO: 123188 - protein, 10 aa, synthetic construct
NPARGDQSTL

SEQ ID NO: 123189 - protein, 10 aa, synthetic construct
NPVRGDQSTL

SEQ ID NO: 123190 - protein, 10 aa, synthetic construct
NPPRGDQSTL

SEQ ID NO: 123191 - protein, 10 aa, synthetic construct
NPLRGDQSTL

SEQ ID NO: 123192 - protein, 10 aa, synthetic construct
NPIRGDQSTL

SEQ ID NO: 123193 - protein, 10 aa, synthetic construct
NPMRGDQSTL

SEQ ID NO: 123194 - protein, 10 aa, synthetic construct
NPWRGDQSTL

SEQ ID NO: 123195 - protein, 10 aa, synthetic construct
NPFRGDQSTL

SEQ ID NO: 123196 - protein, 10 aa, synthetic construct
NPKRGDQSTL

SEQ ID NO: 123197 - protein, 10 aa, synthetic construct
NPRRGDQSTL

SEQ ID NO: 123198 - protein, 10 aa, synthetic construct
NPHRGDQSTL

SEQ ID NO: 123199 - protein, 10 aa, synthetic construct
NPSRGDQSTL

SEQ ID NO: 123200 - protein, 10 aa, synthetic construct
NPTRGDQSTL

SEQ ID NO: 123201 - protein, 10 aa, synthetic construct
NPYRGDQSTL

SEQ ID NO: 123202 - protein, 10 aa, synthetic construct
NPNRGDQSTL

SEQ ID NO: 123203 - protein, 10 aa, synthetic construct
NPQRGDQSTL

SEQ ID NO: 123204 - protein, 10 aa, synthetic construct
NPDRGDQSTL

SEQ ID NO: 123205 - protein, 10 aa, synthetic construct
NPERGDQSTL

SEQ ID NO: 123206 - protein, 10 aa, synthetic construct
NLGRGDQSTL

SEQ ID NO: 123207 - protein, 10 aa, synthetic construct
NLARGDQSTL

SEQ ID NO: 123208 - protein, 10 aa, synthetic construct
NLVRGDQSTL

SEQ ID NO: 123209 - protein, 10 aa, synthetic construct
NLPRGDQSTL

SEQ ID NO: 123210 - protein, 10 aa, synthetic construct
NLLRGDQSTL

SEQ ID NO: 123211 - protein, 10 aa, synthetic construct
NLIRGDQSTL

SEQ ID NO: 123212 - protein, 10 aa, synthetic construct
NLMRGDQSTL

SEQ ID NO: 123213 - protein, 10 aa, synthetic construct
NLWRGDQSTL

SEQ ID NO: 123214 - protein, 10 aa, synthetic construct
NLFRGDQSTL

SEQ ID NO: 123215 - protein, 10 aa, synthetic construct
NLKRGDQSTL

SEQ ID NO: 123216 - protein, 10 aa, synthetic construct
NLRRGDQSTL

SEQ ID NO: 123217 - protein, 10 aa, synthetic construct
NLHRGDQSTL

SEQ ID NO: 123218 - protein, 10 aa, synthetic construct
NLSRGDQSTL

SEQ ID NO: 123219 - protein, 10 aa, synthetic construct
NLTRGDQSTL

SEQ ID NO: 123220 - protein, 10 aa, synthetic construct
NLYRGDQSTL

SEQ ID NO: 123221 - protein, 10 aa, synthetic construct
NLNRGDQSTL

SEQ ID NO: 123222 - protein, 10 aa, synthetic construct
NLQRGDQSTL

SEQ ID NO: 123223 - protein, 10 aa, synthetic construct
NLDRGDQSTL

SEQ ID NO: 123224 - protein, 10 aa, synthetic construct
NLERGDQSTL

SEQ ID NO: 123225 - protein, 10 aa, synthetic construct
NIGRGDQSTL

SEQ ID NO: 123226 - protein, 10 aa, synthetic construct
NIARGDQSTL

SEQ ID NO: 123227 - protein, 10 aa, synthetic construct
NIVRGDQSTL

SEQ ID NO: 123228 - protein, 10 aa, synthetic construct
NIPRGDQSTL

SEQ ID NO: 123229 - protein, 10 aa, synthetic construct
NILRGDQSTL

SEQ ID NO: 123230 - protein, 10 aa, synthetic construct
NIIRGDQSTL

SEQ ID NO: 123231 - protein, 10 aa, synthetic construct
NIMRGDQSTL

SEQ ID NO: 123232 - protein, 10 aa, synthetic construct
NIWRGDQSTL

SEQ ID NO: 123233 - protein, 10 aa, synthetic construct
NIFRGDQSTL

SEQ ID NO: 123234 - protein, 10 aa, synthetic construct
NIKRGDQSTL

SEQ ID NO: 123235 - protein, 10 aa, synthetic construct
NIRRGDQSTL

SEQ ID NO: 123236 - protein, 10 aa, synthetic construct
NIHRGDQSTL

SEQ ID NO: 123237 - protein, 10 aa, synthetic construct
NISRGDQSTL

SEQ ID NO: 123238 - protein, 10 aa, synthetic construct
NITRGDQSTL

SEQ ID NO: 123239 - protein, 10 aa, synthetic construct
NIYRGDQSTL

SEQ ID NO: 123240 - protein, 10 aa, synthetic construct
NINRGDQSTL

SEQ ID NO: 123241 - protein, 10 aa, synthetic construct
NIQRGDQSTL

SEQ ID NO: 123242 - protein, 10 aa, synthetic construct
NIDRGDQSTL

SEQ ID NO: 123243 - protein, 10 aa, synthetic construct
NIERGDQSTL

SEQ ID NO: 123244 - protein, 10 aa, synthetic construct
NMGRGDQSTL

SEQ ID NO: 123245 - protein, 10 aa, synthetic construct
NMARGDQSTL

SEQ ID NO: 123246 - protein, 10 aa, synthetic construct
NMVRGDQSTL

SEQ ID NO: 123247 - protein, 10 aa, synthetic construct
NMPRGDQSTL

SEQ ID NO: 123248 - protein, 10 aa, synthetic construct
NMLRGDQSTL

SEQ ID NO: 123249 - protein, 10 aa, synthetic construct
NMIRGDQSTL

SEQ ID NO: 123250 - protein, 10 aa, synthetic construct
NMMRGDQSTL

SEQ ID NO: 123251 - protein, 10 aa, synthetic construct
NMWRGDQSTL

SEQ ID NO: 123252 - protein, 10 aa, synthetic construct
NMFRGDQSTL

SEQ ID NO: 123253 - protein, 10 aa, synthetic construct
NMKRGDQSTL

SEQ ID NO: 123254 - protein, 10 aa, synthetic construct
NMRRGDQSTL

SEQ ID NO: 123255 - protein, 10 aa, synthetic construct
NMHRGDQSTL

SEQ ID NO: 123256 - protein, 10 aa, synthetic construct
NMSRGDQSTL

SEQ ID NO: 123257 - protein, 10 aa, synthetic construct
NMTRGDQSTL

SEQ ID NO: 123258 - protein, 10 aa, synthetic construct
NMYRGDQSTL

SEQ ID NO: 123259 - protein, 10 aa, synthetic construct
NMNRGDQSTL

SEQ ID NO: 123260 - protein, 10 aa, synthetic construct
NMQRGDQSTL

SEQ ID NO: 123261 - protein, 10 aa, synthetic construct
NMDRGDQSTL

SEQ ID NO: 123262 - protein, 10 aa, synthetic construct
NMERGDQSTL

SEQ ID NO: 123263 - protein, 10 aa, synthetic construct
NWGRGDQSTL

SEQ ID NO: 123264 - protein, 10 aa, synthetic construct
NWARGDQSTL

SEQ ID NO: 123265 - protein, 10 aa, synthetic construct
NWVRGDQSTL

SEQ ID NO: 123266 - protein, 10 aa, synthetic construct
NWPRGDQSTL

SEQ ID NO: 123267 - protein, 10 aa, synthetic construct
NWLRGDQSTL

SEQ ID NO: 123268 - protein, 10 aa, synthetic construct
NWIRGDQSTL

SEQ ID NO: 123269 - protein, 10 aa, synthetic construct
NWMRGDQSTL

SEQ ID NO: 123270 - protein, 10 aa, synthetic construct
NWWRGDQSTL

SEQ ID NO: 123271 - protein, 10 aa, synthetic construct
NWFRGDQSTL

SEQ ID NO: 123272 - protein, 10 aa, synthetic construct
NWKRGDQSTL

SEQ ID NO: 123273 - protein, 10 aa, synthetic construct
NWRRGDQSTL

SEQ ID NO: 123274 - protein, 10 aa, synthetic construct
NWHRGDQSTL

SEQ ID NO: 123275 - protein, 10 aa, synthetic construct
NWSRGDQSTL

SEQ ID NO: 123276 - protein, 10 aa, synthetic construct
NWTRGDQSTL

SEQ ID NO: 123277 - protein, 10 aa, synthetic construct
NWYRGDQSTL

SEQ ID NO: 123278 - protein, 10 aa, synthetic construct
NWNRGDQSTL

SEQ ID NO: 123279 - protein, 10 aa, synthetic construct
NWQRGDQSTL

SEQ ID NO: 123280 - protein, 10 aa, synthetic construct
NWDRGDQSTL

SEQ ID NO: 123281 - protein, 10 aa, synthetic construct
NWERGDQSTL

SEQ ID NO: 123282 - protein, 10 aa, synthetic construct
NFGRGDQSTL

SEQ ID NO: 123283 - protein, 10 aa, synthetic construct
NFARGDQSTL

SEQ ID NO: 123284 - protein, 10 aa, synthetic construct
NFVRGDQSTL

SEQ ID NO: 123285 - protein, 10 aa, synthetic construct
NFPRGDQSTL

SEQ ID NO: 123286 - protein, 10 aa, synthetic construct
NFLRGDQSTL

SEQ ID NO: 123287 - protein, 10 aa, synthetic construct
NFIRGDQSTL

SEQ ID NO: 123288 - protein, 10 aa, synthetic construct
NFMRGDQSTL

SEQ ID NO: 123289 - protein, 10 aa, synthetic construct
NFWRGDQSTL

SEQ ID NO: 123290 - protein, 10 aa, synthetic construct
NFFRGDQSTL

SEQ ID NO: 123291 - protein, 10 aa, synthetic construct
NFKRGDQSTL

SEQ ID NO: 123292 - protein, 10 aa, synthetic construct
NFRRGDQSTL

SEQ ID NO: 123293 - protein, 10 aa, synthetic construct
NFHRGDQSTL

SEQ ID NO: 123294 - protein, 10 aa, synthetic construct
NFSRGDQSTL

SEQ ID NO: 123295 - protein, 10 aa, synthetic construct
NFTRGDQSTL

SEQ ID NO: 123296 - protein, 10 aa, synthetic construct
NFYRGDQSTL

SEQ ID NO: 123297 - protein, 10 aa, synthetic construct
NFNRGDQSTL

SEQ ID NO: 123298 - protein, 10 aa, synthetic construct
NFQRGDQSTL

SEQ ID NO: 123299 - protein, 10 aa, synthetic construct
NFDRGDQSTL

SEQ ID NO: 123300 - protein, 10 aa, synthetic construct
NFERGDQSTL

SEQ ID NO: 123301 - protein, 10 aa, synthetic construct
NKGRGDQSTL

SEQ ID NO: 123302 - protein, 10 aa, synthetic construct
NKARGDQSTL

SEQ ID NO: 123303 - protein, 10 aa, synthetic construct
NKVRGDQSTL

SEQ ID NO: 123304 - protein, 10 aa, synthetic construct
NKPRGDQSTL

SEQ ID NO: 123305 - protein, 10 aa, synthetic construct
NKLRGDQSTL

SEQ ID NO: 123306 - protein, 10 aa, synthetic construct
NKIRGDQSTL

SEQ ID NO: 123307 - protein, 10 aa, synthetic construct
NKMRGDQSTL

SEQ ID NO: 123308 - protein, 10 aa, synthetic construct
NKWRGDQSTL

SEQ ID NO: 123309 - protein, 10 aa, synthetic construct
NKFRGDQSTL

SEQ ID NO: 123310 - protein, 10 aa, synthetic construct
NKKRGDQSTL

SEQ ID NO: 123311 - protein, 10 aa, synthetic construct
NKRRGDQSTL

SEQ ID NO: 123312 - protein, 10 aa, synthetic construct
NKHRGDQSTL

SEQ ID NO: 123313 - protein, 10 aa, synthetic construct
NKSRGDQSTL

SEQ ID NO: 123314 - protein, 10 aa, synthetic construct
NKTRGDQSTL

SEQ ID NO: 123315 - protein, 10 aa, synthetic construct
NKYRGDQSTL

SEQ ID NO: 123316 - protein, 10 aa, synthetic construct
NKNRGDQSTL

SEQ ID NO: 123317 - protein, 10 aa, synthetic construct
NKQRGDQSTL

SEQ ID NO: 123318 - protein, 10 aa, synthetic construct
NKDRGDQSTL

SEQ ID NO: 123319 - protein, 10 aa, synthetic construct
NKERGDQSTL

SEQ ID NO: 123320 - protein, 10 aa, synthetic construct
NRGRGDQSTL

SEQ ID NO: 123321 - protein, 10 aa, synthetic construct
NRARGDQSTL

SEQ ID NO: 123322 - protein, 10 aa, synthetic construct
NRVRGDQSTL

SEQ ID NO: 123323 - protein, 10 aa, synthetic construct
NRPRGDQSTL

SEQ ID NO: 123324 - protein, 10 aa, synthetic construct
NRLRGDQSTL

SEQ ID NO: 123325 - protein, 10 aa, synthetic construct
NRIRGDQSTL

SEQ ID NO: 123326 - protein, 10 aa, synthetic construct
NRMRGDQSTL

SEQ ID NO: 123327 - protein, 10 aa, synthetic construct
NRWRGDQSTL

SEQ ID NO: 123328 - protein, 10 aa, synthetic construct
NRFRGDQSTL

SEQ ID NO: 123329 - protein, 10 aa, synthetic construct
NRKRGDQSTL

SEQ ID NO: 123330 - protein, 10 aa, synthetic construct
NRRRGDQSTL

SEQ ID NO: 123331 - protein, 10 aa, synthetic construct
NRHRGDQSTL

SEQ ID NO: 123332 - protein, 10 aa, synthetic construct
NRSRGDQSTL

SEQ ID NO: 123333 - protein, 10 aa, synthetic construct
NRTRGDQSTL

SEQ ID NO: 123334 - protein, 10 aa, synthetic construct
NRYRGDQSTL

SEQ ID NO: 123335 - protein, 10 aa, synthetic construct
NRNRGDQSTL

SEQ ID NO: 123336 - protein, 10 aa, synthetic construct
NRQRGDQSTL

SEQ ID NO: 123337 - protein, 10 aa, synthetic construct
NRDRGDQSTL

SEQ ID NO: 123338 - protein, 10 aa, synthetic construct
NRERGDQSTL

SEQ ID NO: 123339 - protein, 10 aa, synthetic construct
NHGRGDQSTL

SEQ ID NO: 123340 - protein, 10 aa, synthetic construct
NHARGDQSTL

SEQ ID NO: 123341 - protein, 10 aa, synthetic construct
NHVRGDQSTL

SEQ ID NO: 123342 - protein, 10 aa, synthetic construct
NHPRGDQSTL

SEQ ID NO: 123343 - protein, 10 aa, synthetic construct
NHLRGDQSTL

SEQ ID NO: 123344 - protein, 10 aa, synthetic construct
NHIRGDQSTL

SEQ ID NO: 123345 - protein, 10 aa, synthetic construct
NHMRGDQSTL

SEQ ID NO: 123346 - protein, 10 aa, synthetic construct
NHWRGDQSTL

SEQ ID NO: 123347 - protein, 10 aa, synthetic construct
NHFRGDQSTL

SEQ ID NO: 123348 - protein, 10 aa, synthetic construct
NHKRGDQSTL

SEQ ID NO: 123349 - protein, 10 aa, synthetic construct
NHRRGDQSTL

SEQ ID NO: 123350 - protein, 10 aa, synthetic construct
NHHRGDQSTL

SEQ ID NO: 123351 - protein, 10 aa, synthetic construct
NHSRGDQSTL

SEQ ID NO: 123352 - protein, 10 aa, synthetic construct
NHTRGDQSTL

SEQ ID NO: 123353 - protein, 10 aa, synthetic construct
NHYRGDQSTL

SEQ ID NO: 123354 - protein, 10 aa, synthetic construct
NHNRGDQSTL

SEQ ID NO: 123355 - protein, 10 aa, synthetic construct
NHQRGDQSTL

SEQ ID NO: 123356 - protein, 10 aa, synthetic construct
NHDRGDQSTL

SEQ ID NO: 123357 - protein, 10 aa, synthetic construct
NHERGDQSTL

SEQ ID NO: 123358 - protein, 10 aa, synthetic construct
NSGRGDQSTL

SEQ ID NO: 123359 - protein, 10 aa, synthetic construct
NSARGDQSTL

SEQ ID NO: 123360 - protein, 10 aa, synthetic construct
NSVRGDQSTL

SEQ ID NO: 123361 - protein, 10 aa, synthetic construct
NSPRGDQSTL

SEQ ID NO: 123362 - protein, 10 aa, synthetic construct
NSLRGDQSTL

SEQ ID NO: 123363 - protein, 10 aa, synthetic construct
NSIRGDQSTL

SEQ ID NO: 123364 - protein, 10 aa, synthetic construct
NSMRGDQSTL

SEQ ID NO: 123365 - protein, 10 aa, synthetic construct
NSWRGDQSTL

SEQ ID NO: 123366 - protein, 10 aa, synthetic construct
NSFRGDQSTL

SEQ ID NO: 123367 - protein, 10 aa, synthetic construct
NSKRGDQSTL

SEQ ID NO: 123368 - protein, 10 aa, synthetic construct
NSRRGDQSTL

SEQ ID NO: 123369 - protein, 10 aa, synthetic construct
NSHRGDQSTL

SEQ ID NO: 123370 - protein, 10 aa, synthetic construct
NSSRGDQSTL

SEQ ID NO: 123371 - protein, 10 aa, synthetic construct
NSTRGDQSTL

SEQ ID NO: 123372 - protein, 10 aa, synthetic construct
NSYRGDQSTL

SEQ ID NO: 123373 - protein, 10 aa, synthetic construct
NSNRGDQSTL

SEQ ID NO: 123374 - protein, 10 aa, synthetic construct
NSQRGDQSTL

SEQ ID NO: 123375 - protein, 10 aa, synthetic construct
NSDRGDQSTL

SEQ ID NO: 123376 - protein, 10 aa, synthetic construct
NSERGDQSTL

SEQ ID NO: 123377 - protein, 10 aa, synthetic construct
NTGRGDQSTL

SEQ ID NO: 123378 - protein, 10 aa, synthetic construct
NTARGDQSTL

SEQ ID NO: 123379 - protein, 10 aa, synthetic construct
NTVRGDQSTL

SEQ ID NO: 123380 - protein, 10 aa, synthetic construct
NTPRGDQSTL

SEQ ID NO: 123381 - protein, 10 aa, synthetic construct
NTLRGDQSTL

SEQ ID NO: 123382 - protein, 10 aa, synthetic construct
NTIRGDQSTL

SEQ ID NO: 123383 - protein, 10 aa, synthetic construct
NTMRGDQSTL

SEQ ID NO: 123384 - protein, 10 aa, synthetic construct
NTWRGDQSTL

SEQ ID NO: 123385 - protein, 10 aa, synthetic construct
NTFRGDQSTL

SEQ ID NO: 123386 - protein, 10 aa, synthetic construct
NTKRGDQSTL

SEQ ID NO: 123387 - protein, 10 aa, synthetic construct
NTRRGDQSTL

SEQ ID NO: 123388 - protein, 10 aa, synthetic construct
NTHRGDQSTL

SEQ ID NO: 123389 - protein, 10 aa, synthetic construct
NTSRGDQSTL

SEQ ID NO: 123390 - protein, 10 aa, synthetic construct
NTTRGDQSTL

SEQ ID NO: 123391 - protein, 10 aa, synthetic construct
NTYRGDQSTL

SEQ ID NO: 123392 - protein, 10 aa, synthetic construct
NTNRGDQSTL

SEQ ID NO: 123393 - protein, 10 aa, synthetic construct
NTQRGDQSTL

SEQ ID NO: 123394 - protein, 10 aa, synthetic construct
NTDRGDQSTL

SEQ ID NO: 123395 - protein, 10 aa, synthetic construct
NTERGDQSTL

SEQ ID NO: 123396 - protein, 10 aa, synthetic construct
NYGRGDQSTL

SEQ ID NO: 123397 - protein, 10 aa, synthetic construct
NYARGDQSTL

SEQ ID NO: 123398 - protein, 10 aa, synthetic construct
NYVRGDQSTL

SEQ ID NO: 123399 - protein, 10 aa, synthetic construct
NYPRGDQSTL

SEQ ID NO: 123400 - protein, 10 aa, synthetic construct
NYLRGDQSTL

SEQ ID NO: 123401 - protein, 10 aa, synthetic construct
NYIRGDQSTL

SEQ ID NO: 123402 - protein, 10 aa, synthetic construct
NYMRGDQSTL

SEQ ID NO: 123403 - protein, 10 aa, synthetic construct
NYWRGDQSTL

SEQ ID NO: 123404 - protein, 10 aa, synthetic construct
NYFRGDQSTL

SEQ ID NO: 123405 - protein, 10 aa, synthetic construct
NYKRGDQSTL

SEQ ID NO: 123406 - protein, 10 aa, synthetic construct
NYRRGDQSTL

SEQ ID NO: 123407 - protein, 10 aa, synthetic construct
NYHRGDQSTL

SEQ ID NO: 123408 - protein, 10 aa, synthetic construct
NYSRGDQSTL

SEQ ID NO: 123409 - protein, 10 aa, synthetic construct
NYTRGDQSTL

SEQ ID NO: 123410 - protein, 10 aa, synthetic construct
NYYRGDQSTL

SEQ ID NO: 123411 - protein, 10 aa, synthetic construct
NYNRGDQSTL

SEQ ID NO: 123412 - protein, 10 aa, synthetic construct
NYQRGDQSTL

SEQ ID NO: 123413 - protein, 10 aa, synthetic construct
NYDRGDQSTL

SEQ ID NO: 123414 - protein, 10 aa, synthetic construct
NYERGDQSTL

SEQ ID NO: 123415 - protein, 10 aa, synthetic construct
NNGRGDQSTL

SEQ ID NO: 123416 - protein, 10 aa, synthetic construct
NNARGDQSTL

SEQ ID NO: 123417 - protein, 10 aa, synthetic construct
NNVRGDQSTL

SEQ ID NO: 123418 - protein, 10 aa, synthetic construct
NNPRGDQSTL

SEQ ID NO: 123419 - protein, 10 aa, synthetic construct
NNLRGDQSTL

SEQ ID NO: 123420 - protein, 10 aa, synthetic construct
NNIRGDQSTL

SEQ ID NO: 123421 - protein, 10 aa, synthetic construct
NNMRGDQSTL

SEQ ID NO: 123422 - protein, 10 aa, synthetic construct
NNWRGDQSTL

SEQ ID NO: 123423 - protein, 10 aa, synthetic construct
NNFRGDQSTL

SEQ ID NO: 123424 - protein, 10 aa, synthetic construct
NNKRGDQSTL

SEQ ID NO: 123425 - protein, 10 aa, synthetic construct
NNRRGDQSTL

SEQ ID NO: 123426 - protein, 10 aa, synthetic construct
NNHRGDQSTL

SEQ ID NO: 123427 - protein, 10 aa, synthetic construct
NNSRGDQSTL

SEQ ID NO: 123428 - protein, 10 aa, synthetic construct
NNTRGDQSTL

SEQ ID NO: 123429 - protein, 10 aa, synthetic construct
NNYRGDQSTL

SEQ ID NO: 123430 - protein, 10 aa, synthetic construct
NNNRGDQSTL

SEQ ID NO: 123431 - protein, 10 aa, synthetic construct
NNQRGDQSTL

SEQ ID NO: 123432 - protein, 10 aa, synthetic construct
NNDRGDQSTL

SEQ ID NO: 123433 - protein, 10 aa, synthetic construct
NNERGDQSTL

SEQ ID NO: 123434 - protein, 10 aa, synthetic construct
NQGRGDQSTL

SEQ ID NO: 123435 - protein, 10 aa, synthetic construct
NQARGDQSTL

SEQ ID NO: 123436 - protein, 10 aa, synthetic construct
NQVRGDQSTL

SEQ ID NO: 123437 - protein, 10 aa, synthetic construct
NQPRGDQSTL

SEQ ID NO: 123438 - protein, 10 aa, synthetic construct
NQLRGDQSTL

SEQ ID NO: 123439 - protein, 10 aa, synthetic construct
NQIRGDQSTL

SEQ ID NO: 123440 - protein, 10 aa, synthetic construct
NQMRGDQSTL

SEQ ID NO: 123441 - protein, 10 aa, synthetic construct
NQWRGDQSTL

SEQ ID NO: 123442 - protein, 10 aa, synthetic construct
NQFRGDQSTL

SEQ ID NO: 123443 - protein, 10 aa, synthetic construct
NQKRGDQSTL

SEQ ID NO: 123444 - protein, 10 aa, synthetic construct
NQRRGDQSTL

SEQ ID NO: 123445 - protein, 10 aa, synthetic construct
NQHRGDQSTL

SEQ ID NO: 123446 - protein, 10 aa, synthetic construct
NQSRGDQSTL

SEQ ID NO: 123447 - protein, 10 aa, synthetic construct
NQTRGDQSTL

SEQ ID NO: 123448 - protein, 10 aa, synthetic construct
NQYRGDQSTL

SEQ ID NO: 123449 - protein, 10 aa, synthetic construct
NQNRGDQSTL

SEQ ID NO: 123450 - protein, 10 aa, synthetic construct
NQQRGDQSTL

SEQ ID NO: 123451 - protein, 10 aa, synthetic construct
NQDRGDQSTL

SEQ ID NO: 123452 - protein, 10 aa, synthetic construct
NQERGDQSTL

SEQ ID NO: 123453 - protein, 10 aa, synthetic construct
NDGRGDQSTL

SEQ ID NO: 123454 - protein, 10 aa, synthetic construct
NDARGDQSTL

SEQ ID NO: 123455 - protein, 10 aa, synthetic construct
NDVRGDQSTL

SEQ ID NO: 123456 - protein, 10 aa, synthetic construct
NDPRGDQSTL

SEQ ID NO: 123457 - protein, 10 aa, synthetic construct
NDLRGDQSTL

SEQ ID NO: 123458 - protein, 10 aa, synthetic construct
NDIRGDQSTL

SEQ ID NO: 123459 - protein, 10 aa, synthetic construct
NDMRGDQSTL

SEQ ID NO: 123460 - protein, 10 aa, synthetic construct
NDWRGDQSTL

SEQ ID NO: 123461 - protein, 10 aa, synthetic construct
NDFRGDQSTL

SEQ ID NO: 123462 - protein, 10 aa, synthetic construct
NDKRGDQSTL

SEQ ID NO: 123463 - protein, 10 aa, synthetic construct
NDRRGDQSTL

SEQ ID NO: 123464 - protein, 10 aa, synthetic construct
NDHRGDQSTL

SEQ ID NO: 123465 - protein, 10 aa, synthetic construct
NDSRGDQSTL

SEQ ID NO: 123466 - protein, 10 aa, synthetic construct
NDTRGDQSTL

SEQ ID NO: 123467 - protein, 10 aa, synthetic construct
NDYRGDQSTL

SEQ ID NO: 123468 - protein, 10 aa, synthetic construct
NDNRGDQSTL

SEQ ID NO: 123469 - protein, 10 aa, synthetic construct
NDQRGDQSTL

SEQ ID NO: 123470 - protein, 10 aa, synthetic construct
NDDRGDQSTL

SEQ ID NO: 123471 - protein, 10 aa, synthetic construct
NDERGDQSTL

SEQ ID NO: 123472 - protein, 10 aa, synthetic construct
NEGRGDQSTL

SEQ ID NO: 123473 - protein, 10 aa, synthetic construct
NEARGDQSTL

SEQ ID NO: 123474 - protein, 10 aa, synthetic construct
NEVRGDQSTL

SEQ ID NO: 123475 - protein, 10 aa, synthetic construct
NEPRGDQSTL

SEQ ID NO: 123476 - protein, 10 aa, synthetic construct
NELRGDQSTL

SEQ ID NO: 123477 - protein, 10 aa, synthetic construct
NEIRGDQSTL

SEQ ID NO: 123478 - protein, 10 aa, synthetic construct
NEMRGDQSTL

SEQ ID NO: 123479 - protein, 10 aa, synthetic construct
NEWRGDQSTL

SEQ ID NO: 123480 - protein, 10 aa, synthetic construct
NEFRGDQSTL

SEQ ID NO: 123481 - protein, 10 aa, synthetic construct
NEKRGDQSTL

SEQ ID NO: 123482 - protein, 10 aa, synthetic construct
NERRGDQSTL

SEQ ID NO: 123483 - protein, 10 aa, synthetic construct
NEHRGDQSTL

SEQ ID NO: 123484 - protein, 10 aa, synthetic construct
NESRGDQSTL

SEQ ID NO: 123485 - protein, 10 aa, synthetic construct
NETRGDQSTL

SEQ ID NO: 123486 - protein, 10 aa, synthetic construct
NEYRGDQSTL

SEQ ID NO: 123487 - protein, 10 aa, synthetic construct
NENRGDQSTL

SEQ ID NO: 123488 - protein, 10 aa, synthetic construct
NEQRGDQSTL

SEQ ID NO: 123489 - protein, 10 aa, synthetic construct
NEDRGDQSTL

SEQ ID NO: 123490 - protein, 10 aa, synthetic construct
NEERGDQSTL

SEQ ID NO: 123491 - protein, 10 aa, synthetic construct
DGGRGDQSTL

SEQ ID NO: 123492 - protein, 10 aa, synthetic construct
DGARGDQSTL

SEQ ID NO: 123493 - protein, 10 aa, synthetic construct
DGVRGDQSTL

SEQ ID NO: 123494 - protein, 10 aa, synthetic construct
DGPRGDQSTL

SEQ ID NO: 123495 - protein, 10 aa, synthetic construct
DGLRGDQSTL

SEQ ID NO: 123496 - protein, 10 aa, synthetic construct
DGIRGDQSTL

SEQ ID NO: 123497 - protein, 10 aa, synthetic construct
DGMRGDQSTL

SEQ ID NO: 123498 - protein, 10 aa, synthetic construct
DGWRGDQSTL

SEQ ID NO: 123499 - protein, 10 aa, synthetic construct
DGFRGDQSTL

SEQ ID NO: 123500 - protein, 10 aa, synthetic construct
DGKRGDQSTL

SEQ ID NO: 123501 - protein, 10 aa, synthetic construct
DGRRGDQSTL

SEQ ID NO: 123502 - protein, 10 aa, synthetic construct
DGHRGDQSTL

SEQ ID NO: 123503 - protein, 10 aa, synthetic construct
DGSRGDQSTL

SEQ ID NO: 123504 - protein, 10 aa, synthetic construct
DGTRGDQSTL

SEQ ID NO: 123505 - protein, 10 aa, synthetic construct
DGYRGDQSTL

SEQ ID NO: 123506 - protein, 10 aa, synthetic construct
DGNRGDQSTL

SEQ ID NO: 123507 - protein, 10 aa, synthetic construct
DGQRGDQSTL

SEQ ID NO: 123508 - protein, 10 aa, synthetic construct
DGDRGDQSTL

SEQ ID NO: 123509 - protein, 10 aa, synthetic construct
DGERGDQSTL

SEQ ID NO: 123510 - protein, 10 aa, synthetic construct
DAGRGDQSTL

SEQ ID NO: 123511 - protein, 10 aa, synthetic construct
DAARGDQSTL

SEQ ID NO: 123512 - protein, 10 aa, synthetic construct
DAVRGDQSTL

SEQ ID NO: 123513 - protein, 10 aa, synthetic construct
DAPRGDQSTL

SEQ ID NO: 123514 - protein, 10 aa, synthetic construct
DALRGDQSTL

SEQ ID NO: 123515 - protein, 10 aa, synthetic construct
DAIRGDQSTL

SEQ ID NO: 123516 - protein, 10 aa, synthetic construct
DAMRGDQSTL

SEQ ID NO: 123517 - protein, 10 aa, synthetic construct
DAWRGDQSTL

SEQ ID NO: 123518 - protein, 10 aa, synthetic construct
DAFRGDQSTL

SEQ ID NO: 123519 - protein, 10 aa, synthetic construct
DAKRGDQSTL

SEQ ID NO: 123520 - protein, 10 aa, synthetic construct
DARRGDQSTL

SEQ ID NO: 123521 - protein, 10 aa, synthetic construct
DAHRGDQSTL

SEQ ID NO: 123522 - protein, 10 aa, synthetic construct
DASRGDQSTL

SEQ ID NO: 123523 - protein, 10 aa, synthetic construct
DATRGDQSTL

SEQ ID NO: 123524 - protein, 10 aa, synthetic construct
DAYRGDQSTL

SEQ ID NO: 123525 - protein, 10 aa, synthetic construct
DANRGDQSTL

SEQ ID NO: 123526 - protein, 10 aa, synthetic construct
DAQRGDQSTL

SEQ ID NO: 123527 - protein, 10 aa, synthetic construct
DADRGDQSTL

SEQ ID NO: 123528 - protein, 10 aa, synthetic construct
DAERGDQSTL

SEQ ID NO: 123529 - protein, 10 aa, synthetic construct
DVGRGDQSTL

SEQ ID NO: 123530 - protein, 10 aa, synthetic construct
DVARGDQSTL

SEQ ID NO: 123531 - protein, 10 aa, synthetic construct
DVVRGDQSTL

SEQ ID NO: 123532 - protein, 10 aa, synthetic construct
DVPRGDQSTL

SEQ ID NO: 123533 - protein, 10 aa, synthetic construct
DVLRGDQSTL

SEQ ID NO: 123534 - protein, 10 aa, synthetic construct
DVIRGDQSTL

SEQ ID NO: 123535 - protein, 10 aa, synthetic construct
DVMRGDQSTL

SEQ ID NO: 123536 - protein, 10 aa, synthetic construct
DVWRGDQSTL

SEQ ID NO: 123537 - protein, 10 aa, synthetic construct
DVFRGDQSTL

SEQ ID NO: 123538 - protein, 10 aa, synthetic construct
DVKRGDQSTL

SEQ ID NO: 123539 - protein, 10 aa, synthetic construct
DVRRGDQSTL

SEQ ID NO: 123540 - protein, 10 aa, synthetic construct
DVHRGDQSTL

SEQ ID NO: 123541 - protein, 10 aa, synthetic construct
DVSRGDQSTL

SEQ ID NO: 123542 - protein, 10 aa, synthetic construct
DVTRGDQSTL

SEQ ID NO: 123543 - protein, 10 aa, synthetic construct
DVYRGDQSTL

SEQ ID NO: 123544 - protein, 10 aa, synthetic construct
DVNRGDQSTL

SEQ ID NO: 123545 - protein, 10 aa, synthetic construct
DVQRGDQSTL

SEQ ID NO: 123546 - protein, 10 aa, synthetic construct
DVDRGDQSTL

SEQ ID NO: 123547 - protein, 10 aa, synthetic construct
DVERGDQSTL

SEQ ID NO: 123548 - protein, 10 aa, synthetic construct
DPGRGDQSTL

SEQ ID NO: 123549 - protein, 10 aa, synthetic construct
DPARGDQSTL

SEQ ID NO: 123550 - protein, 10 aa, synthetic construct
DPVRGDQSTL

SEQ ID NO: 123551 - protein, 10 aa, synthetic construct
DPPRGDQSTL

SEQ ID NO: 123552 - protein, 10 aa, synthetic construct
DPLRGDQSTL

SEQ ID NO: 123553 - protein, 10 aa, synthetic construct
DPIRGDQSTL

SEQ ID NO: 123554 - protein, 10 aa, synthetic construct
DPMRGDQSTL

SEQ ID NO: 123555 - protein, 10 aa, synthetic construct
DPWRGDQSTL

SEQ ID NO: 123556 - protein, 10 aa, synthetic construct
DPFRGDQSTL

SEQ ID NO: 123557 - protein, 10 aa, synthetic construct
DPKRGDQSTL

SEQ ID NO: 123558 - protein, 10 aa, synthetic construct
DPRRGDQSTL

SEQ ID NO: 123559 - protein, 10 aa, synthetic construct
DPHRGDQSTL

SEQ ID NO: 123560 - protein, 10 aa, synthetic construct
DPSRGDQSTL

SEQ ID NO: 123561 - protein, 10 aa, synthetic construct
DPTRGDQSTL

SEQ ID NO: 123562 - protein, 10 aa, synthetic construct
DPYRGDQSTL

SEQ ID NO: 123563 - protein, 10 aa, synthetic construct
DPNRGDQSTL

SEQ ID NO: 123564 - protein, 10 aa, synthetic construct
DPQRGDQSTL

SEQ ID NO: 123565 - protein, 10 aa, synthetic construct
DPDRGDQSTL

SEQ ID NO: 123566 - protein, 10 aa, synthetic construct
DPERGDQSTL

SEQ ID NO: 123567 - protein, 10 aa, synthetic construct
DLGRGDQSTL

SEQ ID NO: 123568 - protein, 10 aa, synthetic construct
DLARGDQSTL

SEQ ID NO: 123569 - protein, 10 aa, synthetic construct
DLVRGDQSTL

SEQ ID NO: 123570 - protein, 10 aa, synthetic construct
DLPRGDQSTL

SEQ ID NO: 123571 - protein, 10 aa, synthetic construct
DLLRGDQSTL

SEQ ID NO: 123572 - protein, 10 aa, synthetic construct
DLIRGDQSTL

SEQ ID NO: 123573 - protein, 10 aa, synthetic construct
DLMRGDQSTL

SEQ ID NO: 123574 - protein, 10 aa, synthetic construct
DLWRGDQSTL

SEQ ID NO: 123575 - protein, 10 aa, synthetic construct
DLFRGDQSTL

SEQ ID NO: 123576 - protein, 10 aa, synthetic construct
DLKRGDQSTL

SEQ ID NO: 123577 - protein, 10 aa, synthetic construct
DLRRGDQSTL

SEQ ID NO: 123578 - protein, 10 aa, synthetic construct
DLHRGDQSTL

SEQ ID NO: 123579 - protein, 10 aa, synthetic construct
DLSRGDQSTL

SEQ ID NO: 123580 - protein, 10 aa, synthetic construct
DLTRGDQSTL

SEQ ID NO: 123581 - protein, 10 aa, synthetic construct
DLYRGDQSTL

SEQ ID NO: 123582 - protein, 10 aa, synthetic construct
DLNRGDQSTL

SEQ ID NO: 123583 - protein, 10 aa, synthetic construct
DLQRGDQSTL

SEQ ID NO: 123584 - protein, 10 aa, synthetic construct
DLDRGDQSTL

SEQ ID NO: 123585 - protein, 10 aa, synthetic construct
DLERGDQSTL

SEQ ID NO: 123586 - protein, 10 aa, synthetic construct
DIGRGDQSTL

SEQ ID NO: 123587 - protein, 10 aa, synthetic construct
DIARGDQSTL

SEQ ID NO: 123588 - protein, 10 aa, synthetic construct
DIVRGDQSTL

SEQ ID NO: 123589 - protein, 10 aa, synthetic construct
DIPRGDQSTL

SEQ ID NO: 123590 - protein, 10 aa, synthetic construct
DILRGDQSTL

SEQ ID NO: 123591 - protein, 10 aa, synthetic construct
DIIRGDQSTL

SEQ ID NO: 123592 - protein, 10 aa, synthetic construct
DIMRGDQSTL

SEQ ID NO: 123593 - protein, 10 aa, synthetic construct
DIWRGDQSTL

SEQ ID NO: 123594 - protein, 10 aa, synthetic construct
DIFRGDQSTL

SEQ ID NO: 123595 - protein, 10 aa, synthetic construct
DIKRGDQSTL

SEQ ID NO: 123596 - protein, 10 aa, synthetic construct
DIRRGDQSTL

SEQ ID NO: 123597 - protein, 10 aa, synthetic construct
DIHRGDQSTL

SEQ ID NO: 123598 - protein, 10 aa, synthetic construct
DISRGDQSTL

SEQ ID NO: 123599 - protein, 10 aa, synthetic construct
DITRGDQSTL

SEQ ID NO: 123600 - protein, 10 aa, synthetic construct
DIYRGDQSTL

SEQ ID NO: 123601 - protein, 10 aa, synthetic construct
DINRGDQSTL

SEQ ID NO: 123602 - protein, 10 aa, synthetic construct
DIQRGDQSTL

SEQ ID NO: 123603 - protein, 10 aa, synthetic construct
DIDRGDQSTL

SEQ ID NO: 123604 - protein, 10 aa, synthetic construct
DIERGDQSTL

SEQ ID NO: 123605 - protein, 10 aa, synthetic construct
DMGRGDQSTL

SEQ ID NO: 123606 - protein, 10 aa, synthetic construct
DMARGDQSTL

SEQ ID NO: 123607 - protein, 10 aa, synthetic construct
DMVRGDQSTL

SEQ ID NO: 123608 - protein, 10 aa, synthetic construct
DMPRGDQSTL

SEQ ID NO: 123609 - protein, 10 aa, synthetic construct
DMLRGDQSTL

SEQ ID NO: 123610 - protein, 10 aa, synthetic construct
DMIRGDQSTL

SEQ ID NO: 123611 - protein, 10 aa, synthetic construct
DMMRGDQSTL

SEQ ID NO: 123612 - protein, 10 aa, synthetic construct
DMWRGDQSTL

SEQ ID NO: 123613 - protein, 10 aa, synthetic construct
DMFRGDQSTL

SEQ ID NO: 123614 - protein, 10 aa, synthetic construct
DMKRGDQSTL

SEQ ID NO: 123615 - protein, 10 aa, synthetic construct
DMRRGDQSTL

SEQ ID NO: 123616 - protein, 10 aa, synthetic construct
DMHRGDQSTL

SEQ ID NO: 123617 - protein, 10 aa, synthetic construct
DMSRGDQSTL

SEQ ID NO: 123618 - protein, 10 aa, synthetic construct
DMTRGDQSTL

SEQ ID NO: 123619 - protein, 10 aa, synthetic construct
DMYRGDQSTL

SEQ ID NO: 123620 - protein, 10 aa, synthetic construct
DMNRGDQSTL

SEQ ID NO: 123621 - protein, 10 aa, synthetic construct
DMQRGDQSTL

SEQ ID NO: 123622 - protein, 10 aa, synthetic construct
DMDRGDQSTL

SEQ ID NO: 123623 - protein, 10 aa, synthetic construct
DMERGDQSTL

SEQ ID NO: 123624 - protein, 10 aa, synthetic construct
DWGRGDQSTL

SEQ ID NO: 123625 - protein, 10 aa, synthetic construct
DWARGDQSTL

SEQ ID NO: 123626 - protein, 10 aa, synthetic construct
DWVRGDQSTL

SEQ ID NO: 123627 - protein, 10 aa, synthetic construct
DWPRGDQSTL

SEQ ID NO: 123628 - protein, 10 aa, synthetic construct
DWLRGDQSTL

SEQ ID NO: 123629 - protein, 10 aa, synthetic construct
DWIRGDQSTL

SEQ ID NO: 123630 - protein, 10 aa, synthetic construct
DWMRGDQSTL

SEQ ID NO: 123631 - protein, 10 aa, synthetic construct
DWWRGDQSTL

SEQ ID NO: 123632 - protein, 10 aa, synthetic construct
DWFRGDQSTL

SEQ ID NO: 123633 - protein, 10 aa, synthetic construct
DWKRGDQSTL

SEQ ID NO: 123634 - protein, 10 aa, synthetic construct
DWRRGDQSTL

SEQ ID NO: 123635 - protein, 10 aa, synthetic construct
DWHRGDQSTL

SEQ ID NO: 123636 - protein, 10 aa, synthetic construct
DWSRGDQSTL

SEQ ID NO: 123637 - protein, 10 aa, synthetic construct
DWTRGDQSTL

SEQ ID NO: 123638 - protein, 10 aa, synthetic construct
DWYRGDQSTL

SEQ ID NO: 123639 - protein, 10 aa, synthetic construct
DWNRGDQSTL

SEQ ID NO: 123640 - protein, 10 aa, synthetic construct
DWQRGDQSTL

SEQ ID NO: 123641 - protein, 10 aa, synthetic construct
DWDRGDQSTL

SEQ ID NO: 123642 - protein, 10 aa, synthetic construct
DWERGDQSTL

SEQ ID NO: 123643 - protein, 10 aa, synthetic construct
DFGRGDQSTL

SEQ ID NO: 123644 - protein, 10 aa, synthetic construct
DFARGDQSTL

SEQ ID NO: 123645 - protein, 10 aa, synthetic construct
DFVRGDQSTL

SEQ ID NO: 123646 - protein, 10 aa, synthetic construct
DFPRGDQSTL

SEQ ID NO: 123647 - protein, 10 aa, synthetic construct
DFLRGDQSTL

SEQ ID NO: 123648 - protein, 10 aa, synthetic construct
DFIRGDQSTL

SEQ ID NO: 123649 - protein, 10 aa, synthetic construct
DFMRGDQSTL

SEQ ID NO: 123650 - protein, 10 aa, synthetic construct
DFWRGDQSTL

SEQ ID NO: 123651 - protein, 10 aa, synthetic construct
DFFRGDQSTL

SEQ ID NO: 123652 - protein, 10 aa, synthetic construct
DFKRGDQSTL

SEQ ID NO: 123653 - protein, 10 aa, synthetic construct
DFRRGDQSTL

SEQ ID NO: 123654 - protein, 10 aa, synthetic construct
DFHRGDQSTL

SEQ ID NO: 123655 - protein, 10 aa, synthetic construct
DFSRGDQSTL

SEQ ID NO: 123656 - protein, 10 aa, synthetic construct
DFTRGDQSTL

SEQ ID NO: 123657 - protein, 10 aa, synthetic construct
DFYRGDQSTL

SEQ ID NO: 123658 - protein, 10 aa, synthetic construct
DFNRGDQSTL

SEQ ID NO: 123659 - protein, 10 aa, synthetic construct
DFQRGDQSTL

SEQ ID NO: 123660 - protein, 10 aa, synthetic construct
DFDRGDQSTL

SEQ ID NO: 123661 - protein, 10 aa, synthetic construct
DFERGDQSTL

SEQ ID NO: 123662 - protein, 10 aa, synthetic construct
DKGRGDQSTL

SEQ ID NO: 123663 - protein, 10 aa, synthetic construct
DKARGDQSTL

SEQ ID NO: 123664 - protein, 10 aa, synthetic construct
DKVRGDQSTL

SEQ ID NO: 123665 - protein, 10 aa, synthetic construct
DKPRGDQSTL

SEQ ID NO: 123666 - protein, 10 aa, synthetic construct
DKLRGDQSTL

SEQ ID NO: 123667 - protein, 10 aa, synthetic construct
DKIRGDQSTL

SEQ ID NO: 123668 - protein, 10 aa, synthetic construct
DKMRGDQSTL

SEQ ID NO: 123669 - protein, 10 aa, synthetic construct
DKWRGDQSTL

SEQ ID NO: 123670 - protein, 10 aa, synthetic construct
DKFRGDQSTL

SEQ ID NO: 123671 - protein, 10 aa, synthetic construct
DKKRGDQSTL

SEQ ID NO: 123672 - protein, 10 aa, synthetic construct
DKRRGDQSTL

SEQ ID NO: 123673 - protein, 10 aa, synthetic construct
DKHRGDQSTL

SEQ ID NO: 123674 - protein, 10 aa, synthetic construct
DKSRGDQSTL

SEQ ID NO: 123675 - protein, 10 aa, synthetic construct
DKTRGDQSTL

SEQ ID NO: 123676 - protein, 10 aa, synthetic construct
DKYRGDQSTL

SEQ ID NO: 123677 - protein, 10 aa, synthetic construct
DKNRGDQSTL

SEQ ID NO: 123678 - protein, 10 aa, synthetic construct
DKQRGDQSTL

SEQ ID NO: 123679 - protein, 10 aa, synthetic construct
DKDRGDQSTL

SEQ ID NO: 123680 - protein, 10 aa, synthetic construct
DKERGDQSTL

SEQ ID NO: 123681 - protein, 10 aa, synthetic construct
DRGRGDQSTL

SEQ ID NO: 123682 - protein, 10 aa, synthetic construct
DRARGDQSTL

SEQ ID NO: 123683 - protein, 10 aa, synthetic construct
DRVRGDQSTL

SEQ ID NO: 123684 - protein, 10 aa, synthetic construct
DRPRGDQSTL

SEQ ID NO: 123685 - protein, 10 aa, synthetic construct
DRLRGDQSTL

SEQ ID NO: 123686 - protein, 10 aa, synthetic construct
DRIRGDQSTL

SEQ ID NO: 123687 - protein, 10 aa, synthetic construct
DRMRGDQSTL

SEQ ID NO: 123688 - protein, 10 aa, synthetic construct
DRWRGDQSTL

SEQ ID NO: 123689 - protein, 10 aa, synthetic construct
DRFRGDQSTL

SEQ ID NO: 123690 - protein, 10 aa, synthetic construct
DRKRGDQSTL

SEQ ID NO: 123691 - protein, 10 aa, synthetic construct
DRRRGDQSTL

SEQ ID NO: 123692 - protein, 10 aa, synthetic construct
DRHRGDQSTL

SEQ ID NO: 123693 - protein, 10 aa, synthetic construct
DRSRGDQSTL

SEQ ID NO: 123694 - protein, 10 aa, synthetic construct
DRTRGDQSTL

SEQ ID NO: 123695 - protein, 10 aa, synthetic construct
DRYRGDQSTL

SEQ ID NO: 123696 - protein, 10 aa, synthetic construct
DRNRGDQSTL

SEQ ID NO: 123697 - protein, 10 aa, synthetic construct
DRQRGDQSTL

SEQ ID NO: 123698 - protein, 10 aa, synthetic construct
DRDRGDQSTL

SEQ ID NO: 123699 - protein, 10 aa, synthetic construct
DRERGDQSTL

SEQ ID NO: 123700 - protein, 10 aa, synthetic construct
DHGRGDQSTL

SEQ ID NO: 123701 - protein, 10 aa, synthetic construct
DHARGDQSTL

SEQ ID NO: 123702 - protein, 10 aa, synthetic construct
DHVRGDQSTL

SEQ ID NO: 123703 - protein, 10 aa, synthetic construct
DHPRGDQSTL

SEQ ID NO: 123704 - protein, 10 aa, synthetic construct
DHLRGDQSTL

SEQ ID NO: 123705 - protein, 10 aa, synthetic construct
DHIRGDQSTL

SEQ ID NO: 123706 - protein, 10 aa, synthetic construct
DHMRGDQSTL

SEQ ID NO: 123707 - protein, 10 aa, synthetic construct
DHWRGDQSTL

SEQ ID NO: 123708 - protein, 10 aa, synthetic construct
DHFRGDQSTL

SEQ ID NO: 123709 - protein, 10 aa, synthetic construct
DHKRGDQSTL

SEQ ID NO: 123710 - protein, 10 aa, synthetic construct
DHRRGDQSTL

SEQ ID NO: 123711 - protein, 10 aa, synthetic construct
DHHRGDQSTL

SEQ ID NO: 123712 - protein, 10 aa, synthetic construct
DHSRGDQSTL

SEQ ID NO: 123713 - protein, 10 aa, synthetic construct
DHTRGDQSTL

SEQ ID NO: 123714 - protein, 10 aa, synthetic construct
DHYRGDQSTL

SEQ ID NO: 123715 - protein, 10 aa, synthetic construct
DHNRGDQSTL

SEQ ID NO: 123716 - protein, 10 aa, synthetic construct
DHQRGDQSTL

SEQ ID NO: 123717 - protein, 10 aa, synthetic construct
DHDRGDQSTL

SEQ ID NO: 123718 - protein, 10 aa, synthetic construct
DHERGDQSTL

SEQ ID NO: 123719 - protein, 10 aa, synthetic construct
DSGRGDQSTL

SEQ ID NO: 123720 - protein, 10 aa, synthetic construct
DSARGDQSTL

SEQ ID NO: 123721 - protein, 10 aa, synthetic construct
DSVRGDQSTL

SEQ ID NO: 123722 - protein, 10 aa, synthetic construct
DSPRGDQSTL

SEQ ID NO: 123723 - protein, 10 aa, synthetic construct
DSLRGDQSTL

SEQ ID NO: 123724 - protein, 10 aa, synthetic construct
DSIRGDQSTL

SEQ ID NO: 123725 - protein, 10 aa, synthetic construct
DSMRGDQSTL

SEQ ID NO: 123726 - protein, 10 aa, synthetic construct
DSWRGDQSTL

SEQ ID NO: 123727 - protein, 10 aa, synthetic construct
DSFRGDQSTL

SEQ ID NO: 123728 - protein, 10 aa, synthetic construct
DSKRGDQSTL

SEQ ID NO: 123729 - protein, 10 aa, synthetic construct
DSRRGDQSTL

SEQ ID NO: 123730 - protein, 10 aa, synthetic construct
DSHRGDQSTL

SEQ ID NO: 123731 - protein, 10 aa, synthetic construct
DSSRGDQSTL

SEQ ID NO: 123732 - protein, 10 aa, synthetic construct
DSTRGDQSTL

SEQ ID NO: 123733 - protein, 10 aa, synthetic construct
DSYRGDQSTL

SEQ ID NO: 123734 - protein, 10 aa, synthetic construct
DSNRGDQSTL

SEQ ID NO: 123735 - protein, 10 aa, synthetic construct
DSQRGDQSTL

SEQ ID NO: 123736 - protein, 10 aa, synthetic construct
DSDRGDQSTL

SEQ ID NO: 123737 - protein, 10 aa, synthetic construct
DSERGDQSTL

SEQ ID NO: 123738 - protein, 10 aa, synthetic construct
DTGRGDQSTL

SEQ ID NO: 123739 - protein, 10 aa, synthetic construct
DTARGDQSTL

SEQ ID NO: 123740 - protein, 10 aa, synthetic construct
DTVRGDQSTL

SEQ ID NO: 123741 - protein, 10 aa, synthetic construct
DTPRGDQSTL

SEQ ID NO: 123742 - protein, 10 aa, synthetic construct
DTLRGDQSTL

SEQ ID NO: 123743 - protein, 10 aa, synthetic construct
DTIRGDQSTL

SEQ ID NO: 123744 - protein, 10 aa, synthetic construct
DTMRGDQSTL

SEQ ID NO: 123745 - protein, 10 aa, synthetic construct
DTWRGDQSTL

SEQ ID NO: 123746 - protein, 10 aa, synthetic construct
DTFRGDQSTL

SEQ ID NO: 123747 - protein, 10 aa, synthetic construct
DTKRGDQSTL

SEQ ID NO: 123748 - protein, 10 aa, synthetic construct
DTRRGDQSTL

SEQ ID NO: 123749 - protein, 10 aa, synthetic construct
DTHRGDQSTL

SEQ ID NO: 123750 - protein, 10 aa, synthetic construct
DTSRGDQSTL

SEQ ID NO: 123751 - protein, 10 aa, synthetic construct
DTTRGDQSTL

SEQ ID NO: 123752 - protein, 10 aa, synthetic construct
DTYRGDQSTL

SEQ ID NO: 123753 - protein, 10 aa, synthetic construct
DTNRGDQSTL

SEQ ID NO: 123754 - protein, 10 aa, synthetic construct
DTQRGDQSTL

SEQ ID NO: 123755 - protein, 10 aa, synthetic construct
DTDRGDQSTL

SEQ ID NO: 123756 - protein, 10 aa, synthetic construct
DTERGDQSTL

SEQ ID NO: 123757 - protein, 10 aa, synthetic construct
DYGRGDQSTL

SEQ ID NO: 123758 - protein, 10 aa, synthetic construct
DYARGDQSTL

SEQ ID NO: 123759 - protein, 10 aa, synthetic construct
DYVRGDQSTL

SEQ ID NO: 123760 - protein, 10 aa, synthetic construct
DYPRGDQSTL

SEQ ID NO: 123761 - protein, 10 aa, synthetic construct
DYLRGDQSTL

SEQ ID NO: 123762 - protein, 10 aa, synthetic construct
DYIRGDQSTL

SEQ ID NO: 123763 - protein, 10 aa, synthetic construct
DYMRGDQSTL

SEQ ID NO: 123764 - protein, 10 aa, synthetic construct
DYWRGDQSTL

SEQ ID NO: 123765 - protein, 10 aa, synthetic construct
DYFRGDQSTL

SEQ ID NO: 123766 - protein, 10 aa, synthetic construct
DYKRGDQSTL

SEQ ID NO: 123767 - protein, 10 aa, synthetic construct
DYRRGDQSTL

SEQ ID NO: 123768 - protein, 10 aa, synthetic construct
DYHRGDQSTL

SEQ ID NO: 123769 - protein, 10 aa, synthetic construct
DYSRGDQSTL

SEQ ID NO: 123770 - protein, 10 aa, synthetic construct
DYTRGDQSTL

SEQ ID NO: 123771 - protein, 10 aa, synthetic construct
DYYRGDQSTL

SEQ ID NO: 123772 - protein, 10 aa, synthetic construct
DYNRGDQSTL

SEQ ID NO: 123773 - protein, 10 aa, synthetic construct
DYQRGDQSTL

SEQ ID NO: 123774 - protein, 10 aa, synthetic construct
DYDRGDQSTL

SEQ ID NO: 123775 - protein, 10 aa, synthetic construct
DYERGDQSTL

SEQ ID NO: 123776 - protein, 10 aa, synthetic construct
DNGRGDQSTL

SEQ ID NO: 123777 - protein, 10 aa, synthetic construct
DNARGDQSTL

SEQ ID NO: 123778 - protein, 10 aa, synthetic construct
DNVRGDQSTL

SEQ ID NO: 123779 - protein, 10 aa, synthetic construct
DNPRGDQSTL

SEQ ID NO: 123780 - protein, 10 aa, synthetic construct
DNLRGDQSTL

SEQ ID NO: 123781 - protein, 10 aa, synthetic construct
DNIRGDQSTL

SEQ ID NO: 123782 - protein, 10 aa, synthetic construct
DNMRGDQSTL

SEQ ID NO: 123783 - protein, 10 aa, synthetic construct
DNWRGDQSTL

SEQ ID NO: 123784 - protein, 10 aa, synthetic construct
DNFRGDQSTL

SEQ ID NO: 123785 - protein, 10 aa, synthetic construct
DNKRGDQSTL

SEQ ID NO: 123786 - protein, 10 aa, synthetic construct
DNRRGDQSTL

SEQ ID NO: 123787 - protein, 10 aa, synthetic construct
DNHRGDQSTL

SEQ ID NO: 123788 - protein, 10 aa, synthetic construct
DNSRGDQSTL

SEQ ID NO: 123789 - protein, 10 aa, synthetic construct
DNTRGDQSTL

SEQ ID NO: 123790 - protein, 10 aa, synthetic construct
DNYRGDQSTL

SEQ ID NO: 123791 - protein, 10 aa, synthetic construct
DNNRGDQSTL

SEQ ID NO: 123792 - protein, 10 aa, synthetic construct
DNQRGDQSTL

SEQ ID NO: 123793 - protein, 10 aa, synthetic construct
DNDRGDQSTL

SEQ ID NO: 123794 - protein, 10 aa, synthetic construct
DNERGDQSTL

SEQ ID NO: 123795 - protein, 10 aa, synthetic construct
DQGRGDQSTL

SEQ ID NO: 123796 - protein, 10 aa, synthetic construct
DQARGDQSTL

SEQ ID NO: 123797 - protein, 10 aa, synthetic construct
DQVRGDQSTL

SEQ ID NO: 123798 - protein, 10 aa, synthetic construct
DQPRGDQSTL

SEQ ID NO: 123799 - protein, 10 aa, synthetic construct
DQLRGDQSTL

SEQ ID NO: 123800 - protein, 10 aa, synthetic construct
DQIRGDQSTL

SEQ ID NO: 123801 - protein, 10 aa, synthetic construct
DQMRGDQSTL

SEQ ID NO: 123802 - protein, 10 aa, synthetic construct
DQWRGDQSTL

SEQ ID NO: 123803 - protein, 10 aa, synthetic construct
DQFRGDQSTL

SEQ ID NO: 123804 - protein, 10 aa, synthetic construct
DQKRGDQSTL

SEQ ID NO: 123805 - protein, 10 aa, synthetic construct
DQRRGDQSTL

SEQ ID NO: 123806 - protein, 10 aa, synthetic construct
DQHRGDQSTL

SEQ ID NO: 123807 - protein, 10 aa, synthetic construct
DQSRGDQSTL

SEQ ID NO: 123808 - protein, 10 aa, synthetic construct
DQTRGDQSTL

SEQ ID NO: 123809 - protein, 10 aa, synthetic construct
DQYRGDQSTL

SEQ ID NO: 123810 - protein, 10 aa, synthetic construct
DQNRGDQSTL

SEQ ID NO: 123811 - protein, 10 aa, synthetic construct
DQQRGDQSTL

SEQ ID NO: 123812 - protein, 10 aa, synthetic construct
DQDRGDQSTL

SEQ ID NO: 123813 - protein, 10 aa, synthetic construct
DQERGDQSTL

SEQ ID NO: 123814 - protein, 10 aa, synthetic construct
DDGRGDQSTL

SEQ ID NO: 123815 - protein, 10 aa, synthetic construct
DDARGDQSTL

SEQ ID NO: 123816 - protein, 10 aa, synthetic construct
DDVRGDQSTL

SEQ ID NO: 123817 - protein, 10 aa, synthetic construct
DDPRGDQSTL

SEQ ID NO: 123818 - protein, 10 aa, synthetic construct
DDLRGDQSTL

SEQ ID NO: 123819 - protein, 10 aa, synthetic construct
DDIRGDQSTL

SEQ ID NO: 123820 - protein, 10 aa, synthetic construct
DDMRGDQSTL

SEQ ID NO: 123821 - protein, 10 aa, synthetic construct
DDWRGDQSTL

SEQ ID NO: 123822 - protein, 10 aa, synthetic construct
DDFRGDQSTL

SEQ ID NO: 123823 - protein, 10 aa, synthetic construct
DDKRGDQSTL

SEQ ID NO: 123824 - protein, 10 aa, synthetic construct
DDRRGDQSTL

SEQ ID NO: 123825 - protein, 10 aa, synthetic construct
DDHRGDQSTL

SEQ ID NO: 123826 - protein, 10 aa, synthetic construct
DDSRGDQSTL

SEQ ID NO: 123827 - protein, 10 aa, synthetic construct
DDTRGDQSTL

SEQ ID NO: 123828 - protein, 10 aa, synthetic construct
DDYRGDQSTL

SEQ ID NO: 123829 - protein, 10 aa, synthetic construct
DDNRGDQSTL

SEQ ID NO: 123830 - protein, 10 aa, synthetic construct
DDQRGDQSTL

SEQ ID NO: 123831 - protein, 10 aa, synthetic construct
DDDRGDQSTL

SEQ ID NO: 123832 - protein, 10 aa, synthetic construct
DDERGDQSTL

SEQ ID NO: 123833 - protein, 10 aa, synthetic construct
DEGRGDQSTL

SEQ ID NO: 123834 - protein, 10 aa, synthetic construct
DEARGDQSTL

SEQ ID NO: 123835 - protein, 10 aa, synthetic construct
DEVRGDQSTL

SEQ ID NO: 123836 - protein, 10 aa, synthetic construct
DEPRGDQSTL

SEQ ID NO: 123837 - protein, 10 aa, synthetic construct
DELRGDQSTL

SEQ ID NO: 123838 - protein, 10 aa, synthetic construct
DEIRGDQSTL

SEQ ID NO: 123839 - protein, 10 aa, synthetic construct
DEMRGDQSTL

SEQ ID NO: 123840 - protein, 10 aa, synthetic construct
DEWRGDQSTL

SEQ ID NO: 123841 - protein, 10 aa, synthetic construct
DEFRGDQSTL

SEQ ID NO: 123842 - protein, 10 aa, synthetic construct
DEKRGDQSTL

SEQ ID NO: 123843 - protein, 10 aa, synthetic construct
DERRGDQSTL

SEQ ID NO: 123844 - protein, 10 aa, synthetic construct
DEHRGDQSTL

SEQ ID NO: 123845 - protein, 10 aa, synthetic construct
DESRGDQSTL

SEQ ID NO: 123846 - protein, 10 aa, synthetic construct
DETRGDQSTL

SEQ ID NO: 123847 - protein, 10 aa, synthetic construct
DEYRGDQSTL

SEQ ID NO: 123848 - protein, 10 aa, synthetic construct
DENRGDQSTL

SEQ ID NO: 123849 - protein, 10 aa, synthetic construct
DEQRGDQSTL

SEQ ID NO: 123850 - protein, 10 aa, synthetic construct
DEDRGDQSTL

SEQ ID NO: 123851 - protein, 10 aa, synthetic construct
DEERGDQSTL

SEQ ID NO: 123852 - protein, 10 aa, synthetic construct
QGGRGDQSTL

SEQ ID NO: 123853 - protein, 10 aa, synthetic construct
QGARGDQSTL

SEQ ID NO: 123854 - protein, 10 aa, synthetic construct
QGVRGDQSTL

SEQ ID NO: 123855 - protein, 10 aa, synthetic construct
QGPRGDQSTL

SEQ ID NO: 123856 - protein, 10 aa, synthetic construct
QGLRGDQSTL

SEQ ID NO: 123857 - protein, 10 aa, synthetic construct
QGIRGDQSTL

SEQ ID NO: 123858 - protein, 10 aa, synthetic construct
QGMRGDQSTL

SEQ ID NO: 123859 - protein, 10 aa, synthetic construct
QGWRGDQSTL

SEQ ID NO: 123860 - protein, 10 aa, synthetic construct
QGFRGDQSTL

SEQ ID NO: 123861 - protein, 10 aa, synthetic construct
QGKRGDQSTL

SEQ ID NO: 123862 - protein, 10 aa, synthetic construct
QGRRGDQSTL

SEQ ID NO: 123863 - protein, 10 aa, synthetic construct
QGHRGDQSTL

SEQ ID NO: 123864 - protein, 10 aa, synthetic construct
QGSRGDQSTL

SEQ ID NO: 123865 - protein, 10 aa, synthetic construct
QGTRGDQSTL

SEQ ID NO: 123866 - protein, 10 aa, synthetic construct
QGYRGDQSTL

SEQ ID NO: 123867 - protein, 10 aa, synthetic construct
QGNRGDQSTL

SEQ ID NO: 123868 - protein, 10 aa, synthetic construct
QGQRGDQSTL

SEQ ID NO: 123869 - protein, 10 aa, synthetic construct
QGDRGDQSTL

SEQ ID NO: 123870 - protein, 10 aa, synthetic construct
QGERGDQSTL

SEQ ID NO: 123871 - protein, 10 aa, synthetic construct
QAGRGDQSTL

SEQ ID NO: 123872 - protein, 10 aa, synthetic construct
QAARGDQSTL

SEQ ID NO: 123873 - protein, 10 aa, synthetic construct
QAVRGDQSTL

SEQ ID NO: 123874 - protein, 10 aa, synthetic construct
QAPRGDQSTL

SEQ ID NO: 123875 - protein, 10 aa, synthetic construct
QALRGDQSTL

SEQ ID NO: 123876 - protein, 10 aa, synthetic construct
QAIRGDQSTL

SEQ ID NO: 123877 - protein, 10 aa, synthetic construct
QAMRGDQSTL

SEQ ID NO: 123878 - protein, 10 aa, synthetic construct
QAWRGDQSTL

SEQ ID NO: 123879 - protein, 10 aa, synthetic construct
QAFRGDQSTL

SEQ ID NO: 123880 - protein, 10 aa, synthetic construct
QAKRGDQSTL

SEQ ID NO: 123881 - protein, 10 aa, synthetic construct
QARRGDQSTL

SEQ ID NO: 123882 - protein, 10 aa, synthetic construct
QAHRGDQSTL

SEQ ID NO: 123883 - protein, 10 aa, synthetic construct
QASRGDQSTL

SEQ ID NO: 123884 - protein, 10 aa, synthetic construct
QATRGDQSTL

SEQ ID NO: 123885 - protein, 10 aa, synthetic construct
QAYRGDQSTL

SEQ ID NO: 123886 - protein, 10 aa, synthetic construct
QANRGDQSTL

SEQ ID NO: 123887 - protein, 10 aa, synthetic construct
QAQRGDQSTL

SEQ ID NO: 123888 - protein, 10 aa, synthetic construct
QADRGDQSTL

SEQ ID NO: 123889 - protein, 10 aa, synthetic construct
QAERGDQSTL

SEQ ID NO: 123890 - protein, 10 aa, synthetic construct
QVGRGDQSTL

SEQ ID NO: 123891 - protein, 10 aa, synthetic construct
QVARGDQSTL

SEQ ID NO: 123892 - protein, 10 aa, synthetic construct
QVVRGDQSTL

SEQ ID NO: 123893 - protein, 10 aa, synthetic construct
QVPRGDQSTL

SEQ ID NO: 123894 - protein, 10 aa, synthetic construct
QVLRGDQSTL

SEQ ID NO: 123895 - protein, 10 aa, synthetic construct
QVIRGDQSTL

SEQ ID NO: 123896 - protein, 10 aa, synthetic construct
QVMRGDQSTL

SEQ ID NO: 123897 - protein, 10 aa, synthetic construct
QVWRGDQSTL

SEQ ID NO: 123898 - protein, 10 aa, synthetic construct
QVFRGDQSTL

SEQ ID NO: 123899 - protein, 10 aa, synthetic construct
QVKRGDQSTL

SEQ ID NO: 123900 - protein, 10 aa, synthetic construct
QVRRGDQSTL

SEQ ID NO: 123901 - protein, 10 aa, synthetic construct
QVHRGDQSTL

SEQ ID NO: 123902 - protein, 10 aa, synthetic construct
QVSRGDQSTL

SEQ ID NO: 123903 - protein, 10 aa, synthetic construct
QVTRGDQSTL

SEQ ID NO: 123904 - protein, 10 aa, synthetic construct
QVYRGDQSTL

SEQ ID NO: 123905 - protein, 10 aa, synthetic construct
QVNRGDQSTL

SEQ ID NO: 123906 - protein, 10 aa, synthetic construct
QVQRGDQSTL

SEQ ID NO: 123907 - protein, 10 aa, synthetic construct
QVDRGDQSTL

SEQ ID NO: 123908 - protein, 10 aa, synthetic construct
QVERGDQSTL

SEQ ID NO: 123909 - protein, 10 aa, synthetic construct
QPGRGDQSTL

SEQ ID NO: 123910 - protein, 10 aa, synthetic construct
QPARGDQSTL

SEQ ID NO: 123911 - protein, 10 aa, synthetic construct
QPVRGDQSTL

SEQ ID NO: 123912 - protein, 10 aa, synthetic construct
QPPRGDQSTL

SEQ ID NO: 123913 - protein, 10 aa, synthetic construct
QPLRGDQSTL

SEQ ID NO: 123914 - protein, 10 aa, synthetic construct
QPIRGDQSTL

SEQ ID NO: 123915 - protein, 10 aa, synthetic construct
QPMRGDQSTL

SEQ ID NO: 123916 - protein, 10 aa, synthetic construct
QPWRGDQSTL

SEQ ID NO: 123917 - protein, 10 aa, synthetic construct
QPFRGDQSTL

SEQ ID NO: 123918 - protein, 10 aa, synthetic construct
QPKRGDQSTL

SEQ ID NO: 123919 - protein, 10 aa, synthetic construct
QPRRGDQSTL

SEQ ID NO: 123920 - protein, 10 aa, synthetic construct
QPHRGDQSTL

SEQ ID NO: 123921 - protein, 10 aa, synthetic construct
QPSRGDQSTL

SEQ ID NO: 123922 - protein, 10 aa, synthetic construct
QPTRGDQSTL

SEQ ID NO: 123923 - protein, 10 aa, synthetic construct
QPYRGDQSTL

SEQ ID NO: 123924 - protein, 10 aa, synthetic construct
QPNRGDQSTL

SEQ ID NO: 123925 - protein, 10 aa, synthetic construct
QPQRGDQSTL

SEQ ID NO: 123926 - protein, 10 aa, synthetic construct
QPDRGDQSTL

SEQ ID NO: 123927 - protein, 10 aa, synthetic construct
QPERGDQSTL

SEQ ID NO: 123928 - protein, 10 aa, synthetic construct
QLGRGDQSTL

SEQ ID NO: 123929 - protein, 10 aa, synthetic construct
QLARGDQSTL

SEQ ID NO: 123930 - protein, 10 aa, synthetic construct
QLVRGDQSTL

SEQ ID NO: 123931 - protein, 10 aa, synthetic construct
QLPRGDQSTL

SEQ ID NO: 123932 - protein, 10 aa, synthetic construct
QLLRGDQSTL

SEQ ID NO: 123933 - protein, 10 aa, synthetic construct
QLIRGDQSTL

SEQ ID NO: 123934 - protein, 10 aa, synthetic construct
QLMRGDQSTL

SEQ ID NO: 123935 - protein, 10 aa, synthetic construct
QLWRGDQSTL

SEQ ID NO: 123936 - protein, 10 aa, synthetic construct
QLFRGDQSTL

SEQ ID NO: 123937 - protein, 10 aa, synthetic construct
QLKRGDQSTL

SEQ ID NO: 123938 - protein, 10 aa, synthetic construct
QLRRGDQSTL

SEQ ID NO: 123939 - protein, 10 aa, synthetic construct
QLHRGDQSTL

SEQ ID NO: 123940 - protein, 10 aa, synthetic construct
QLSRGDQSTL

SEQ ID NO: 123941 - protein, 10 aa, synthetic construct
QLTRGDQSTL

SEQ ID NO: 123942 - protein, 10 aa, synthetic construct
QLYRGDQSTL

SEQ ID NO: 123943 - protein, 10 aa, synthetic construct
QLNRGDQSTL

SEQ ID NO: 123944 - protein, 10 aa, synthetic construct
QLQRGDQSTL

SEQ ID NO: 123945 - protein, 10 aa, synthetic construct
QLDRGDQSTL

SEQ ID NO: 123946 - protein, 10 aa, synthetic construct
QLERGDQSTL

SEQ ID NO: 123947 - protein, 10 aa, synthetic construct
QIGRGDQSTL

SEQ ID NO: 123948 - protein, 10 aa, synthetic construct
QIARGDQSTL

SEQ ID NO: 123949 - protein, 10 aa, synthetic construct
QIVRGDQSTL

SEQ ID NO: 123950 - protein, 10 aa, synthetic construct
QIPRGDQSTL

SEQ ID NO: 123951 - protein, 10 aa, synthetic construct
QILRGDQSTL

SEQ ID NO: 123952 - protein, 10 aa, synthetic construct
QIIRGDQSTL

SEQ ID NO: 123953 - protein, 10 aa, synthetic construct
QIMRGDQSTL

SEQ ID NO: 123954 - protein, 10 aa, synthetic construct
QIWRGDQSTL

SEQ ID NO: 123955 - protein, 10 aa, synthetic construct
QIFRGDQSTL

SEQ ID NO: 123956 - protein, 10 aa, synthetic construct
QIKRGDQSTL

SEQ ID NO: 123957 - protein, 10 aa, synthetic construct
QIRRGDQSTL

SEQ ID NO: 123958 - protein, 10 aa, synthetic construct
QIHRGDQSTL

SEQ ID NO: 123959 - protein, 10 aa, synthetic construct
QISRGDQSTL

SEQ ID NO: 123960 - protein, 10 aa, synthetic construct
QITRGDQSTL

SEQ ID NO: 123961 - protein, 10 aa, synthetic construct
QIYRGDQSTL

SEQ ID NO: 123962 - protein, 10 aa, synthetic construct
QINRGDQSTL

SEQ ID NO: 123963 - protein, 10 aa, synthetic construct
QIQRGDQSTL

SEQ ID NO: 123964 - protein, 10 aa, synthetic construct
QIDRGDQSTL

SEQ ID NO: 123965 - protein, 10 aa, synthetic construct
QIERGDQSTL

SEQ ID NO: 123966 - protein, 10 aa, synthetic construct
QMGRGDQSTL

SEQ ID NO: 123967 - protein, 10 aa, synthetic construct
QMARGDQSTL

SEQ ID NO: 123968 - protein, 10 aa, synthetic construct
QMVRGDQSTL

SEQ ID NO: 123969 - protein, 10 aa, synthetic construct
QMPRGDQSTL

SEQ ID NO: 123970 - protein, 10 aa, synthetic construct
QMLRGDQSTL

SEQ ID NO: 123971 - protein, 10 aa, synthetic construct
QMIRGDQSTL

SEQ ID NO: 123972 - protein, 10 aa, synthetic construct
QMMRGDQSTL

SEQ ID NO: 123973 - protein, 10 aa, synthetic construct
QMWRGDQSTL

SEQ ID NO: 123974 - protein, 10 aa, synthetic construct
QMFRGDQSTL

SEQ ID NO: 123975 - protein, 10 aa, synthetic construct
QMKRGDQSTL

SEQ ID NO: 123976 - protein, 10 aa, synthetic construct
QMRRGDQSTL

SEQ ID NO: 123977 - protein, 10 aa, synthetic construct
QMHRGDQSTL

SEQ ID NO: 123978 - protein, 10 aa, synthetic construct
QMSRGDQSTL

SEQ ID NO: 123979 - protein, 10 aa, synthetic construct
QMTRGDQSTL

SEQ ID NO: 123980 - protein, 10 aa, synthetic construct
QMYRGDQSTL

SEQ ID NO: 123981 - protein, 10 aa, synthetic construct
QMNRGDQSTL

SEQ ID NO: 123982 - protein, 10 aa, synthetic construct
QMQRGDQSTL

SEQ ID NO: 123983 - protein, 10 aa, synthetic construct
QMDRGDQSTL

SEQ ID NO: 123984 - protein, 10 aa, synthetic construct
QMERGDQSTL

SEQ ID NO: 123985 - protein, 10 aa, synthetic construct
QWGRGDQSTL

SEQ ID NO: 123986 - protein, 10 aa, synthetic construct
QWARGDQSTL

SEQ ID NO: 123987 - protein, 10 aa, synthetic construct
QWVRGDQSTL

SEQ ID NO: 123988 - protein, 10 aa, synthetic construct
QWPRGDQSTL

SEQ ID NO: 123989 - protein, 10 aa, synthetic construct
QWLRGDQSTL

SEQ ID NO: 123990 - protein, 10 aa, synthetic construct
QWIRGDQSTL

SEQ ID NO: 123991 - protein, 10 aa, synthetic construct
QWMRGDQSTL

SEQ ID NO: 123992 - protein, 10 aa, synthetic construct
QWWRGDQSTL

SEQ ID NO: 123993 - protein, 10 aa, synthetic construct
QWFRGDQSTL

SEQ ID NO: 123994 - protein, 10 aa, synthetic construct
QWKRGDQSTL

SEQ ID NO: 123995 - protein, 10 aa, synthetic construct
QWRRGDQSTL

SEQ ID NO: 123996 - protein, 10 aa, synthetic construct
QWHRGDQSTL

SEQ ID NO: 123997 - protein, 10 aa, synthetic construct
QWSRGDQSTL

SEQ ID NO: 123998 - protein, 10 aa, synthetic construct
QWTRGDQSTL

SEQ ID NO: 123999 - protein, 10 aa, synthetic construct
QWYRGDQSTL

SEQ ID NO: 124000 - protein, 10 aa, synthetic construct
QWNRGDQSTL

SEQ ID NO: 124001 - protein, 10 aa, synthetic construct
QWQRGDQSTL

SEQ ID NO: 124002 - protein, 10 aa, synthetic construct
QWDRGDQSTL

SEQ ID NO: 124003 - protein, 10 aa, synthetic construct
QWERGDQSTL

SEQ ID NO: 124004 - protein, 10 aa, synthetic construct
QFGRGDQSTL

SEQ ID NO: 124005 - protein, 10 aa, synthetic construct
QFARGDQSTL

SEQ ID NO: 124006 - protein, 10 aa, synthetic construct
QFVRGDQSTL

SEQ ID NO: 124007 - protein, 10 aa, synthetic construct
QFPRGDQSTL

SEQ ID NO: 124008 - protein, 10 aa, synthetic construct
QFLRGDQSTL

SEQ ID NO: 124009 - protein, 10 aa, synthetic construct
QFIRGDQSTL

SEQ ID NO: 124010 - protein, 10 aa, synthetic construct
QFMRGDQSTL

SEQ ID NO: 124011 - protein, 10 aa, synthetic construct
QFWRGDQSTL

SEQ ID NO: 124012 - protein, 10 aa, synthetic construct
QFFRGDQSTL

SEQ ID NO: 124013 - protein, 10 aa, synthetic construct
QFKRGDQSTL

SEQ ID NO: 124014 - protein, 10 aa, synthetic construct
QFRRGDQSTL

SEQ ID NO: 124015 - protein, 10 aa, synthetic construct
QFHRGDQSTL

SEQ ID NO: 124016 - protein, 10 aa, synthetic construct
QFSRGDQSTL

SEQ ID NO: 124017 - protein, 10 aa, synthetic construct
QFTRGDQSTL

SEQ ID NO: 124018 - protein, 10 aa, synthetic construct
QFYRGDQSTL

SEQ ID NO: 124019 - protein, 10 aa, synthetic construct
QFNRGDQSTL

SEQ ID NO: 124020 - protein, 10 aa, synthetic construct
QFQRGDQSTL

SEQ ID NO: 124021 - protein, 10 aa, synthetic construct
QFDRGDQSTL

SEQ ID NO: 124022 - protein, 10 aa, synthetic construct
QFERGDQSTL

SEQ ID NO: 124023 - protein, 10 aa, synthetic construct
QKGRGDQSTL

SEQ ID NO: 124024 - protein, 10 aa, synthetic construct
QKARGDQSTL

SEQ ID NO: 124025 - protein, 10 aa, synthetic construct
QKVRGDQSTL

SEQ ID NO: 124026 - protein, 10 aa, synthetic construct
QKPRGDQSTL

SEQ ID NO: 124027 - protein, 10 aa, synthetic construct
QKLRGDQSTL

SEQ ID NO: 124028 - protein, 10 aa, synthetic construct
QKIRGDQSTL

SEQ ID NO: 124029 - protein, 10 aa, synthetic construct
QKMRGDQSTL

SEQ ID NO: 124030 - protein, 10 aa, synthetic construct
QKWRGDQSTL

SEQ ID NO: 124031 - protein, 10 aa, synthetic construct
QKFRGDQSTL

SEQ ID NO: 124032 - protein, 10 aa, synthetic construct
QKKRGDQSTL

SEQ ID NO: 124033 - protein, 10 aa, synthetic construct
QKRRGDQSTL

SEQ ID NO: 124034 - protein, 10 aa, synthetic construct
QKHRGDQSTL

SEQ ID NO: 124035 - protein, 10 aa, synthetic construct
QKSRGDQSTL

SEQ ID NO: 124036 - protein, 10 aa, synthetic construct
QKTRGDQSTL

SEQ ID NO: 124037 - protein, 10 aa, synthetic construct
QKYRGDQSTL

SEQ ID NO: 124038 - protein, 10 aa, synthetic construct
QKNRGDQSTL

SEQ ID NO: 124039 - protein, 10 aa, synthetic construct
QKQRGDQSTL

SEQ ID NO: 124040 - protein, 10 aa, synthetic construct
QKDRGDQSTL

SEQ ID NO: 124041 - protein, 10 aa, synthetic construct
QKERGDQSTL

SEQ ID NO: 124042 - protein, 10 aa, synthetic construct
QRGRGDQSTL

SEQ ID NO: 124043 - protein, 10 aa, synthetic construct
QRARGDQSTL

SEQ ID NO: 124044 - protein, 10 aa, synthetic construct
QRVRGDQSTL

SEQ ID NO: 124045 - protein, 10 aa, synthetic construct
QRPRGDQSTL

SEQ ID NO: 124046 - protein, 10 aa, synthetic construct
QRLRGDQSTL

SEQ ID NO: 124047 - protein, 10 aa, synthetic construct
QRIRGDQSTL

SEQ ID NO: 124048 - protein, 10 aa, synthetic construct
QRMRGDQSTL

SEQ ID NO: 124049 - protein, 10 aa, synthetic construct
QRWRGDQSTL

SEQ ID NO: 124050 - protein, 10 aa, synthetic construct
QRFRGDQSTL

SEQ ID NO: 124051 - protein, 10 aa, synthetic construct
QRKRGDQSTL

SEQ ID NO: 124052 - protein, 10 aa, synthetic construct
QRRRGDQSTL

SEQ ID NO: 124053 - protein, 10 aa, synthetic construct
QRHRGDQSTL

SEQ ID NO: 124054 - protein, 10 aa, synthetic construct
QRSRGDQSTL

SEQ ID NO: 124055 - protein, 10 aa, synthetic construct
QRTRGDQSTL

SEQ ID NO: 124056 - protein, 10 aa, synthetic construct
QRYRGDQSTL

SEQ ID NO: 124057 - protein, 10 aa, synthetic construct
QRNRGDQSTL

SEQ ID NO: 124058 - protein, 10 aa, synthetic construct
QRQRGDQSTL

SEQ ID NO: 124059 - protein, 10 aa, synthetic construct
QRDRGDQSTL

SEQ ID NO: 124060 - protein, 10 aa, synthetic construct
QRERGDQSTL

SEQ ID NO: 124061 - protein, 10 aa, synthetic construct
QHGRGDQSTL

SEQ ID NO: 124062 - protein, 10 aa, synthetic construct
QHARGDQSTL

SEQ ID NO: 124063 - protein, 10 aa, synthetic construct
QHVRGDQSTL

SEQ ID NO: 124064 - protein, 10 aa, synthetic construct
QHPRGDQSTL

SEQ ID NO: 124065 - protein, 10 aa, synthetic construct
QHLRGDQSTL

SEQ ID NO: 124066 - protein, 10 aa, synthetic construct
QHIRGDQSTL

SEQ ID NO: 124067 - protein, 10 aa, synthetic construct
QHMRGDQSTL

SEQ ID NO: 124068 - protein, 10 aa, synthetic construct
QHWRGDQSTL

SEQ ID NO: 124069 - protein, 10 aa, synthetic construct
QHFRGDQSTL

SEQ ID NO: 124070 - protein, 10 aa, synthetic construct
QHKRGDQSTL

SEQ ID NO: 124071 - protein, 10 aa, synthetic construct
QHRRGDQSTL

SEQ ID NO: 124072 - protein, 10 aa, synthetic construct
QHHRGDQSTL

SEQ ID NO: 124073 - protein, 10 aa, synthetic construct
QHSRGDQSTL

SEQ ID NO: 124074 - protein, 10 aa, synthetic construct
QHTRGDQSTL

SEQ ID NO: 124075 - protein, 10 aa, synthetic construct
QHYRGDQSTL

SEQ ID NO: 124076 - protein, 10 aa, synthetic construct
QHNRGDQSTL

SEQ ID NO: 124077 - protein, 10 aa, synthetic construct
QHQRGDQSTL

SEQ ID NO: 124078 - protein, 10 aa, synthetic construct
QHDRGDQSTL

SEQ ID NO: 124079 - protein, 10 aa, synthetic construct
QHERGDQSTL

SEQ ID NO: 124080 - protein, 10 aa, synthetic construct
QSGRGDQSTL

SEQ ID NO: 124081 - protein, 10 aa, synthetic construct
QSARGDQSTL

SEQ ID NO: 124082 - protein, 10 aa, synthetic construct
QSVRGDQSTL

SEQ ID NO: 124083 - protein, 10 aa, synthetic construct
QSPRGDQSTL

SEQ ID NO: 124084 - protein, 10 aa, synthetic construct
QSLRGDQSTL

SEQ ID NO: 124085 - protein, 10 aa, synthetic construct
QSIRGDQSTL

SEQ ID NO: 124086 - protein, 10 aa, synthetic construct
QSMRGDQSTL

SEQ ID NO: 124087 - protein, 10 aa, synthetic construct
QSWRGDQSTL

SEQ ID NO: 124088 - protein, 10 aa, synthetic construct
QSFRGDQSTL

SEQ ID NO: 124089 - protein, 10 aa, synthetic construct
QSKRGDQSTL

SEQ ID NO: 124090 - protein, 10 aa, synthetic construct
QSRRGDQSTL

SEQ ID NO: 124091 - protein, 10 aa, synthetic construct
QSHRGDQSTL

SEQ ID NO: 124092 - protein, 10 aa, synthetic construct
QSSRGDQSTL

SEQ ID NO: 124093 - protein, 10 aa, synthetic construct
QSTRGDQSTL

SEQ ID NO: 124094 - protein, 10 aa, synthetic construct
QSYRGDQSTL

SEQ ID NO: 124095 - protein, 10 aa, synthetic construct
QSNRGDQSTL

SEQ ID NO: 124096 - protein, 10 aa, synthetic construct
QSQRGDQSTL

SEQ ID NO: 124097 - protein, 10 aa, synthetic construct
QSDRGDQSTL

SEQ ID NO: 124098 - protein, 10 aa, synthetic construct
QSERGDQSTL

SEQ ID NO: 124099 - protein, 10 aa, synthetic construct
QTGRGDQSTL

SEQ ID NO: 124100 - protein, 10 aa, synthetic construct
QTARGDQSTL

SEQ ID NO: 124101 - protein, 10 aa, synthetic construct
QTVRGDQSTL

SEQ ID NO: 124102 - protein, 10 aa, synthetic construct
QTPRGDQSTL

SEQ ID NO: 124103 - protein, 10 aa, synthetic construct
QTLRGDQSTL

SEQ ID NO: 124104 - protein, 10 aa, synthetic construct
QTIRGDQSTL

SEQ ID NO: 124105 - protein, 10 aa, synthetic construct
QTMRGDQSTL

SEQ ID NO: 124106 - protein, 10 aa, synthetic construct
QTWRGDQSTL

SEQ ID NO: 124107 - protein, 10 aa, synthetic construct
QTFRGDQSTL

SEQ ID NO: 124108 - protein, 10 aa, synthetic construct
QTKRGDQSTL

SEQ ID NO: 124109 - protein, 10 aa, synthetic construct
QTRRGDQSTL

SEQ ID NO: 124110 - protein, 10 aa, synthetic construct
QTHRGDQSTL

SEQ ID NO: 124111 - protein, 10 aa, synthetic construct
QTSRGDQSTL

SEQ ID NO: 124112 - protein, 10 aa, synthetic construct
QTTRGDQSTL

SEQ ID NO: 124113 - protein, 10 aa, synthetic construct
QTYRGDQSTL

SEQ ID NO: 124114 - protein, 10 aa, synthetic construct
QTNRGDQSTL

SEQ ID NO: 124115 - protein, 10 aa, synthetic construct
QTQRGDQSTL

SEQ ID NO: 124116 - protein, 10 aa, synthetic construct
QTDRGDQSTL

SEQ ID NO: 124117 - protein, 10 aa, synthetic construct
QTERGDQSTL

SEQ ID NO: 124118 - protein, 10 aa, synthetic construct
QYGRGDQSTL

SEQ ID NO: 124119 - protein, 10 aa, synthetic construct
QYARGDQSTL

SEQ ID NO: 124120 - protein, 10 aa, synthetic construct
QYVRGDQSTL

SEQ ID NO: 124121 - protein, 10 aa, synthetic construct
QYPRGDQSTL

SEQ ID NO: 124122 - protein, 10 aa, synthetic construct
QYLRGDQSTL

SEQ ID NO: 124123 - protein, 10 aa, synthetic construct
QYIRGDQSTL

SEQ ID NO: 124124 - protein, 10 aa, synthetic construct
QYMRGDQSTL

SEQ ID NO: 124125 - protein, 10 aa, synthetic construct
QYWRGDQSTL

SEQ ID NO: 124126 - protein, 10 aa, synthetic construct
QYFRGDQSTL

SEQ ID NO: 124127 - protein, 10 aa, synthetic construct
QYKRGDQSTL

SEQ ID NO: 124128 - protein, 10 aa, synthetic construct
QYRRGDQSTL

SEQ ID NO: 124129 - protein, 10 aa, synthetic construct
QYHRGDQSTL

SEQ ID NO: 124130 - protein, 10 aa, synthetic construct
QYSRGDQSTL

SEQ ID NO: 124131 - protein, 10 aa, synthetic construct
QYTRGDQSTL

SEQ ID NO: 124132 - protein, 10 aa, synthetic construct
QYYRGDQSTL

SEQ ID NO: 124133 - protein, 10 aa, synthetic construct
QYNRGDQSTL

SEQ ID NO: 124134 - protein, 10 aa, synthetic construct
QYQRGDQSTL

SEQ ID NO: 124135 - protein, 10 aa, synthetic construct
QYDRGDQSTL

SEQ ID NO: 124136 - protein, 10 aa, synthetic construct
QYERGDQSTL

SEQ ID NO: 124137 - protein, 10 aa, synthetic construct
QNGRGDQSTL

SEQ ID NO: 124138 - protein, 10 aa, synthetic construct
QNARGDQSTL

SEQ ID NO: 124139 - protein, 10 aa, synthetic construct
QNVRGDQSTL

SEQ ID NO: 124140 - protein, 10 aa, synthetic construct
QNPRGDQSTL

SEQ ID NO: 124141 - protein, 10 aa, synthetic construct
QNLRGDQSTL

SEQ ID NO: 124142 - protein, 10 aa, synthetic construct
QNIRGDQSTL

SEQ ID NO: 124143 - protein, 10 aa, synthetic construct
QNMRGDQSTL

SEQ ID NO: 124144 - protein, 10 aa, synthetic construct
QNWRGDQSTL

SEQ ID NO: 124145 - protein, 10 aa, synthetic construct
QNFRGDQSTL

SEQ ID NO: 124146 - protein, 10 aa, synthetic construct
QNKRGDQSTL

SEQ ID NO: 124147 - protein, 10 aa, synthetic construct
QNRRGDQSTL

SEQ ID NO: 124148 - protein, 10 aa, synthetic construct
QNHRGDQSTL

SEQ ID NO: 124149 - protein, 10 aa, synthetic construct
QNSRGDQSTL

SEQ ID NO: 124150 - protein, 10 aa, synthetic construct
QNTRGDQSTL

SEQ ID NO: 124151 - protein, 10 aa, synthetic construct
QNYRGDQSTL

SEQ ID NO: 124152 - protein, 10 aa, synthetic construct
QNNRGDQSTL

SEQ ID NO: 124153 - protein, 10 aa, synthetic construct
QNQRGDQSTL

SEQ ID NO: 124154 - protein, 10 aa, synthetic construct
QNDRGDQSTL

SEQ ID NO: 124155 - protein, 10 aa, synthetic construct
QNERGDQSTL

SEQ ID NO: 124156 - protein, 10 aa, synthetic construct
QQGRGDQSTL

SEQ ID NO: 124157 - protein, 10 aa, synthetic construct
QQARGDQSTL

SEQ ID NO: 124158 - protein, 10 aa, synthetic construct
QQVRGDQSTL

SEQ ID NO: 124159 - protein, 10 aa, synthetic construct
QQPRGDQSTL

SEQ ID NO: 124160 - protein, 10 aa, synthetic construct
QQLRGDQSTL

SEQ ID NO: 124161 - protein, 10 aa, synthetic construct
QQIRGDQSTL

SEQ ID NO: 124162 - protein, 10 aa, synthetic construct
QQMRGDQSTL

SEQ ID NO: 124163 - protein, 10 aa, synthetic construct
QQWRGDQSTL

SEQ ID NO: 124164 - protein, 10 aa, synthetic construct
QQFRGDQSTL

SEQ ID NO: 124165 - protein, 10 aa, synthetic construct
QQKRGDQSTL

SEQ ID NO: 124166 - protein, 10 aa, synthetic construct
QQRRGDQSTL

SEQ ID NO: 124167 - protein, 10 aa, synthetic construct
QQHRGDQSTL

SEQ ID NO: 124168 - protein, 10 aa, synthetic construct
QQSRGDQSTL

SEQ ID NO: 124169 - protein, 10 aa, synthetic construct
QQTRGDQSTL

SEQ ID NO: 124170 - protein, 10 aa, synthetic construct
QQYRGDQSTL

SEQ ID NO: 124171 - protein, 10 aa, synthetic construct
QQNRGDQSTL

SEQ ID NO: 124172 - protein, 10 aa, synthetic construct
QQQRGDQSTL

SEQ ID NO: 124173 - protein, 10 aa, synthetic construct
QQDRGDQSTL

SEQ ID NO: 124174 - protein, 10 aa, synthetic construct
QQERGDQSTL

SEQ ID NO: 124175 - protein, 10 aa, synthetic construct
QDGRGDQSTL

SEQ ID NO: 124176 - protein, 10 aa, synthetic construct
QDARGDQSTL

SEQ ID NO: 124177 - protein, 10 aa, synthetic construct
QDVRGDQSTL

SEQ ID NO: 124178 - protein, 10 aa, synthetic construct
QDPRGDQSTL

SEQ ID NO: 124179 - protein, 10 aa, synthetic construct
QDLRGDQSTL

SEQ ID NO: 124180 - protein, 10 aa, synthetic construct
QDIRGDQSTL

SEQ ID NO: 124181 - protein, 10 aa, synthetic construct
QDMRGDQSTL

SEQ ID NO: 124182 - protein, 10 aa, synthetic construct
QDWRGDQSTL

SEQ ID NO: 124183 - protein, 10 aa, synthetic construct
QDFRGDQSTL

SEQ ID NO: 124184 - protein, 10 aa, synthetic construct
QDKRGDQSTL

SEQ ID NO: 124185 - protein, 10 aa, synthetic construct
QDRRGDQSTL

SEQ ID NO: 124186 - protein, 10 aa, synthetic construct
QDHRGDQSTL

SEQ ID NO: 124187 - protein, 10 aa, synthetic construct
QDSRGDQSTL

SEQ ID NO: 124188 - protein, 10 aa, synthetic construct
QDTRGDQSTL

SEQ ID NO: 124189 - protein, 10 aa, synthetic construct
QDYRGDQSTL

SEQ ID NO: 124190 - protein, 10 aa, synthetic construct
QDNRGDQSTL

SEQ ID NO: 124191 - protein, 10 aa, synthetic construct
QDQRGDQSTL

SEQ ID NO: 124192 - protein, 10 aa, synthetic construct
QDDRGDQSTL

SEQ ID NO: 124193 - protein, 10 aa, synthetic construct
QDERGDQSTL

SEQ ID NO: 124194 - protein, 10 aa, synthetic construct
QEGRGDQSTL

SEQ ID NO: 124195 - protein, 10 aa, synthetic construct
QEARGDQSTL

SEQ ID NO: 124196 - protein, 10 aa, synthetic construct
QEVRGDQSTL

SEQ ID NO: 124197 - protein, 10 aa, synthetic construct
QEPRGDQSTL

SEQ ID NO: 124198 - protein, 10 aa, synthetic construct
QELRGDQSTL

SEQ ID NO: 124199 - protein, 10 aa, synthetic construct
QEIRGDQSTL

SEQ ID NO: 124200 - protein, 10 aa, synthetic construct
QEMRGDQSTL

SEQ ID NO: 124201 - protein, 10 aa, synthetic construct
QEWRGDQSTL

SEQ ID NO: 124202 - protein, 10 aa, synthetic construct
QEFRGDQSTL

SEQ ID NO: 124203 - protein, 10 aa, synthetic construct
QEKRGDQSTL

SEQ ID NO: 124204 - protein, 10 aa, synthetic construct
QERRGDQSTL

SEQ ID NO: 124205 - protein, 10 aa, synthetic construct
QEHRGDQSTL

SEQ ID NO: 124206 - protein, 10 aa, synthetic construct
QESRGDQSTL

SEQ ID NO: 124207 - protein, 10 aa, synthetic construct
QETRGDQSTL

SEQ ID NO: 124208 - protein, 10 aa, synthetic construct
QEYRGDQSTL

SEQ ID NO: 124209 - protein, 10 aa, synthetic construct
QENRGDQSTL

SEQ ID NO: 124210 - protein, 10 aa, synthetic construct
QEQRGDQSTL

SEQ ID NO: 124211 - protein, 10 aa, synthetic construct
QEDRGDQSTL

SEQ ID NO: 124212 - protein, 10 aa, synthetic construct
QEERGDQSTL

SEQ ID NO: 124213 - protein, 10 aa, synthetic construct
SGGRGDRGQI

SEQ ID NO: 124214 - protein, 10 aa, synthetic construct
SGARGDRGQI

SEQ ID NO: 124215 - protein, 10 aa, synthetic construct
SGVRGDRGQI

SEQ ID NO: 124216 - protein, 10 aa, synthetic construct
SGPRGDRGQI

SEQ ID NO: 124217 - protein, 10 aa, synthetic construct
SGLRGDRGQI

SEQ ID NO: 124218 - protein, 10 aa, synthetic construct
SGIRGDRGQI

SEQ ID NO: 124219 - protein, 10 aa, synthetic construct
SGMRGDRGQI

SEQ ID NO: 124220 - protein, 10 aa, synthetic construct
SGWRGDRGQI

SEQ ID NO: 124221 - protein, 10 aa, synthetic construct
SGFRGDRGQI

SEQ ID NO: 124222 - protein, 10 aa, synthetic construct
SGKRGDRGQI

SEQ ID NO: 124223 - protein, 10 aa, synthetic construct
SGRRGDRGQI

SEQ ID NO: 124224 - protein, 10 aa, synthetic construct
SGHRGDRGQI

SEQ ID NO: 124225 - protein, 10 aa, synthetic construct
SGSRGDRGQI

SEQ ID NO: 124226 - protein, 10 aa, synthetic construct
SGTRGDRGQI

SEQ ID NO: 124227 - protein, 10 aa, synthetic construct
SGYRGDRGQI

SEQ ID NO: 124228 - protein, 10 aa, synthetic construct
SGNRGDRGQI

SEQ ID NO: 124229 - protein, 10 aa, synthetic construct
SGQRGDRGQI

SEQ ID NO: 124230 - protein, 10 aa, synthetic construct
SGDRGDRGQI

SEQ ID NO: 124231 - protein, 10 aa, synthetic construct
SGERGDRGQI

SEQ ID NO: 124232 - protein, 10 aa, synthetic construct
SAGRGDRGQI

SEQ ID NO: 124233 - protein, 10 aa, synthetic construct
SAARGDRGQI

SEQ ID NO: 124234 - protein, 10 aa, synthetic construct
SAVRGDRGQI

SEQ ID NO: 124235 - protein, 10 aa, synthetic construct
SAPRGDRGQI

SEQ ID NO: 124236 - protein, 10 aa, synthetic construct
SALRGDRGQI

SEQ ID NO: 124237 - protein, 10 aa, synthetic construct
SAIRGDRGQI

SEQ ID NO: 124238 - protein, 10 aa, synthetic construct
SAMRGDRGQI

SEQ ID NO: 124239 - protein, 10 aa, synthetic construct
SAWRGDRGQI

SEQ ID NO: 124240 - protein, 10 aa, synthetic construct
SAFRGDRGQI

SEQ ID NO: 124241 - protein, 10 aa, synthetic construct
SAKRGDRGQI

SEQ ID NO: 124242 - protein, 10 aa, synthetic construct
SARRGDRGQI

SEQ ID NO: 124243 - protein, 10 aa, synthetic construct
SAHRGDRGQI

SEQ ID NO: 124244 - protein, 10 aa, synthetic construct
SASRGDRGQI

SEQ ID NO: 124245 - protein, 10 aa, synthetic construct
SATRGDRGQI

SEQ ID NO: 124246 - protein, 10 aa, synthetic construct
SAYRGDRGQI

SEQ ID NO: 124247 - protein, 10 aa, synthetic construct
SANRGDRGQI

SEQ ID NO: 124248 - protein, 10 aa, synthetic construct
SADRGDRGQI

SEQ ID NO: 124249 - protein, 10 aa, synthetic construct
SAERGDRGQI

SEQ ID NO: 124250 - protein, 10 aa, synthetic construct
SVGRGDRGQI

SEQ ID NO: 124251 - protein, 10 aa, synthetic construct
SVARGDRGQI

SEQ ID NO: 124252 - protein, 10 aa, synthetic construct
SVVRGDRGQI

SEQ ID NO: 124253 - protein, 10 aa, synthetic construct
SVPRGDRGQI

SEQ ID NO: 124254 - protein, 10 aa, synthetic construct
SVLRGDRGQI

SEQ ID NO: 124255 - protein, 10 aa, synthetic construct
SVIRGDRGQI

SEQ ID NO: 124256 - protein, 10 aa, synthetic construct
SVMRGDRGQI

SEQ ID NO: 124257 - protein, 10 aa, synthetic construct
SVWRGDRGQI

SEQ ID NO: 124258 - protein, 10 aa, synthetic construct
SVFRGDRGQI

SEQ ID NO: 124259 - protein, 10 aa, synthetic construct
SVKRGDRGQI

SEQ ID NO: 124260 - protein, 10 aa, synthetic construct
SVRRGDRGQI

SEQ ID NO: 124261 - protein, 10 aa, synthetic construct
SVHRGDRGQI

SEQ ID NO: 124262 - protein, 10 aa, synthetic construct
SVSRGDRGQI

SEQ ID NO: 124263 - protein, 10 aa, synthetic construct
SVTRGDRGQI

SEQ ID NO: 124264 - protein, 10 aa, synthetic construct
SVYRGDRGQI

SEQ ID NO: 124265 - protein, 10 aa, synthetic construct
SVNRGDRGQI

SEQ ID NO: 124266 - protein, 10 aa, synthetic construct
SVQRGDRGQI

SEQ ID NO: 124267 - protein, 10 aa, synthetic construct
SVDRGDRGQI

SEQ ID NO: 124268 - protein, 10 aa, synthetic construct
SVERGDRGQI

SEQ ID NO: 124269 - protein, 10 aa, synthetic construct
SPGRGDRGQI

SEQ ID NO: 124270 - protein, 10 aa, synthetic construct
SPARGDRGQI

SEQ ID NO: 124271 - protein, 10 aa, synthetic construct
SPVRGDRGQI

SEQ ID NO: 124272 - protein, 10 aa, synthetic construct
SPPRGDRGQI

SEQ ID NO: 124273 - protein, 10 aa, synthetic construct
SPLRGDRGQI

SEQ ID NO: 124274 - protein, 10 aa, synthetic construct
SPIRGDRGQI

SEQ ID NO: 124275 - protein, 10 aa, synthetic construct
SPMRGDRGQI

SEQ ID NO: 124276 - protein, 10 aa, synthetic construct
SPWRGDRGQI

SEQ ID NO: 124277 - protein, 10 aa, synthetic construct
SPFRGDRGQI

SEQ ID NO: 124278 - protein, 10 aa, synthetic construct
SPKRGDRGQI

SEQ ID NO: 124279 - protein, 10 aa, synthetic construct
SPRRGDRGQI

SEQ ID NO: 124280 - protein, 10 aa, synthetic construct
SPHRGDRGQI

SEQ ID NO: 124281 - protein, 10 aa, synthetic construct
SPSRGDRGQI

SEQ ID NO: 124282 - protein, 10 aa, synthetic construct
SPTRGDRGQI

SEQ ID NO: 124283 - protein, 10 aa, synthetic construct
SPYRGDRGQI

SEQ ID NO: 124284 - protein, 10 aa, synthetic construct
SPNRGDRGQI

SEQ ID NO: 124285 - protein, 10 aa, synthetic construct
SPQRGDRGQI

SEQ ID NO: 124286 - protein, 10 aa, synthetic construct
SPDRGDRGQI

SEQ ID NO: 124287 - protein, 10 aa, synthetic construct
SPERGDRGQI

SEQ ID NO: 124288 - protein, 10 aa, synthetic construct
SLGRGDRGQI

SEQ ID NO: 124289 - protein, 10 aa, synthetic construct
SLARGDRGQI

SEQ ID NO: 124290 - protein, 10 aa, synthetic construct
SLVRGDRGQI

SEQ ID NO: 124291 - protein, 10 aa, synthetic construct
SLPRGDRGQI

SEQ ID NO: 124292 - protein, 10 aa, synthetic construct
SLLRGDRGQI

SEQ ID NO: 124293 - protein, 10 aa, synthetic construct
SLIRGDRGQI

SEQ ID NO: 124294 - protein, 10 aa, synthetic construct
SLMRGDRGQI

SEQ ID NO: 124295 - protein, 10 aa, synthetic construct
SLWRGDRGQI

SEQ ID NO: 124296 - protein, 10 aa, synthetic construct
SLFRGDRGQI

SEQ ID NO: 124297 - protein, 10 aa, synthetic construct
SLKRGDRGQI

SEQ ID NO: 124298 - protein, 10 aa, synthetic construct
SLRRGDRGQI

SEQ ID NO: 124299 - protein, 10 aa, synthetic construct
SLHRGDRGQI

SEQ ID NO: 124300 - protein, 10 aa, synthetic construct
SLSRGDRGQI

SEQ ID NO: 124301 - protein, 10 aa, synthetic construct
SLTRGDRGQI

SEQ ID NO: 124302 - protein, 10 aa, synthetic construct
SLYRGDRGQI

SEQ ID NO: 124303 - protein, 10 aa, synthetic construct
SLNRGDRGQI

SEQ ID NO: 124304 - protein, 10 aa, synthetic construct
SLQRGDRGQI

SEQ ID NO: 124305 - protein, 10 aa, synthetic construct
SLDRGDRGQI

SEQ ID NO: 124306 - protein, 10 aa, synthetic construct
SLERGDRGQI

SEQ ID NO: 124307 - protein, 10 aa, synthetic construct
SIGRGDRGQI

SEQ ID NO: 124308 - protein, 10 aa, synthetic construct
SIARGDRGQI

SEQ ID NO: 124309 - protein, 10 aa, synthetic construct
SIVRGDRGQI

SEQ ID NO: 124310 - protein, 10 aa, synthetic construct
SIPRGDRGQI

SEQ ID NO: 124311 - protein, 10 aa, synthetic construct
SILRGDRGQI

SEQ ID NO: 124312 - protein, 10 aa, synthetic construct
SIIRGDRGQI

SEQ ID NO: 124313 - protein, 10 aa, synthetic construct
SIMRGDRGQI

SEQ ID NO: 124314 - protein, 10 aa, synthetic construct
SIWRGDRGQI

SEQ ID NO: 124315 - protein, 10 aa, synthetic construct
SIFRGDRGQI

SEQ ID NO: 124316 - protein, 10 aa, synthetic construct
SIKRGDRGQI

SEQ ID NO: 124317 - protein, 10 aa, synthetic construct
SIRRGDRGQI

SEQ ID NO: 124318 - protein, 10 aa, synthetic construct
SIHRGDRGQI

SEQ ID NO: 124319 - protein, 10 aa, synthetic construct
SISRGDRGQI

SEQ ID NO: 124320 - protein, 10 aa, synthetic construct
SITRGDRGQI

SEQ ID NO: 124321 - protein, 10 aa, synthetic construct
SIYRGDRGQI

SEQ ID NO: 124322 - protein, 10 aa, synthetic construct
SINRGDRGQI

SEQ ID NO: 124323 - protein, 10 aa, synthetic construct
SIQRGDRGQI

SEQ ID NO: 124324 - protein, 10 aa, synthetic construct
SIDRGDRGQI

SEQ ID NO: 124325 - protein, 10 aa, synthetic construct
SIERGDRGQI

SEQ ID NO: 124326 - protein, 10 aa, synthetic construct
SMGRGDRGQI

SEQ ID NO: 124327 - protein, 10 aa, synthetic construct
SMARGDRGQI

SEQ ID NO: 124328 - protein, 10 aa, synthetic construct
SMVRGDRGQI

SEQ ID NO: 124329 - protein, 10 aa, synthetic construct
SMPRGDRGQI

SEQ ID NO: 124330 - protein, 10 aa, synthetic construct
SMLRGDRGQI

SEQ ID NO: 124331 - protein, 10 aa, synthetic construct
SMIRGDRGQI

SEQ ID NO: 124332 - protein, 10 aa, synthetic construct
SMMRGDRGQI

SEQ ID NO: 124333 - protein, 10 aa, synthetic construct
SMWRGDRGQI

SEQ ID NO: 124334 - protein, 10 aa, synthetic construct
SMFRGDRGQI

SEQ ID NO: 124335 - protein, 10 aa, synthetic construct
SMKRGDRGQI

SEQ ID NO: 124336 - protein, 10 aa, synthetic construct
SMRRGDRGQI

SEQ ID NO: 124337 - protein, 10 aa, synthetic construct
SMHRGDRGQI

SEQ ID NO: 124338 - protein, 10 aa, synthetic construct
SMSRGDRGQI

SEQ ID NO: 124339 - protein, 10 aa, synthetic construct
SMTRGDRGQI

SEQ ID NO: 124340 - protein, 10 aa, synthetic construct
SMYRGDRGQI

SEQ ID NO: 124341 - protein, 10 aa, synthetic construct
SMNRGDRGQI

SEQ ID NO: 124342 - protein, 10 aa, synthetic construct
SMQRGDRGQI

SEQ ID NO: 124343 - protein, 10 aa, synthetic construct
SMDRGDRGQI

SEQ ID NO: 124344 - protein, 10 aa, synthetic construct
SMERGDRGQI

SEQ ID NO: 124345 - protein, 10 aa, synthetic construct
SWGRGDRGQI

SEQ ID NO: 124346 - protein, 10 aa, synthetic construct
SWARGDRGQI

SEQ ID NO: 124347 - protein, 10 aa, synthetic construct
SWVRGDRGQI

SEQ ID NO: 124348 - protein, 10 aa, synthetic construct
SWPRGDRGQI

SEQ ID NO: 124349 - protein, 10 aa, synthetic construct
SWLRGDRGQI

SEQ ID NO: 124350 - protein, 10 aa, synthetic construct
SWIRGDRGQI

SEQ ID NO: 124351 - protein, 10 aa, synthetic construct
SWMRGDRGQI

SEQ ID NO: 124352 - protein, 10 aa, synthetic construct
SWWRGDRGQI

SEQ ID NO: 124353 - protein, 10 aa, synthetic construct
SWFRGDRGQI

SEQ ID NO: 124354 - protein, 10 aa, synthetic construct
SWKRGDRGQI

SEQ ID NO: 124355 - protein, 10 aa, synthetic construct
SWRRGDRGQI

SEQ ID NO: 124356 - protein, 10 aa, synthetic construct
SWHRGDRGQI

SEQ ID NO: 124357 - protein, 10 aa, synthetic construct
SWSRGDRGQI

SEQ ID NO: 124358 - protein, 10 aa, synthetic construct
SWTRGDRGQI

SEQ ID NO: 124359 - protein, 10 aa, synthetic construct
SWYRGDRGQI

SEQ ID NO: 124360 - protein, 10 aa, synthetic construct
SWNRGDRGQI

SEQ ID NO: 124361 - protein, 10 aa, synthetic construct
SWQRGDRGQI

SEQ ID NO: 124362 - protein, 10 aa, synthetic construct
SWDRGDRGQI

SEQ ID NO: 124363 - protein, 10 aa, synthetic construct
SWERGDRGQI

SEQ ID NO: 124364 - protein, 10 aa, synthetic construct
SFGRGDRGQI

SEQ ID NO: 124365 - protein, 10 aa, synthetic construct
SFARGDRGQI

SEQ ID NO: 124366 - protein, 10 aa, synthetic construct
SFVRGDRGQI

SEQ ID NO: 124367 - protein, 10 aa, synthetic construct
SFPRGDRGQI

SEQ ID NO: 124368 - protein, 10 aa, synthetic construct
SFLRGDRGQI

SEQ ID NO: 124369 - protein, 10 aa, synthetic construct
SFIRGDRGQI

SEQ ID NO: 124370 - protein, 10 aa, synthetic construct
SFMRGDRGQI

SEQ ID NO: 124371 - protein, 10 aa, synthetic construct
SFWRGDRGQI

SEQ ID NO: 124372 - protein, 10 aa, synthetic construct
SFFRGDRGQI

SEQ ID NO: 124373 - protein, 10 aa, synthetic construct
SFKRGDRGQI

SEQ ID NO: 124374 - protein, 10 aa, synthetic construct
SFRRGDRGQI

SEQ ID NO: 124375 - protein, 10 aa, synthetic construct
SFHRGDRGQI

SEQ ID NO: 124376 - protein, 10 aa, synthetic construct
SFSRGDRGQI

SEQ ID NO: 124377 - protein, 10 aa, synthetic construct
SFTRGDRGQI

SEQ ID NO: 124378 - protein, 10 aa, synthetic construct
SFYRGDRGQI

SEQ ID NO: 124379 - protein, 10 aa, synthetic construct
SFNRGDRGQI

SEQ ID NO: 124380 - protein, 10 aa, synthetic construct
SFQRGDRGQI

SEQ ID NO: 124381 - protein, 10 aa, synthetic construct
SFDRGDRGQI

SEQ ID NO: 124382 - protein, 10 aa, synthetic construct
SFERGDRGQI

SEQ ID NO: 124383 - protein, 10 aa, synthetic construct
SKGRGDRGQI

SEQ ID NO: 124384 - protein, 10 aa, synthetic construct
SKARGDRGQI

SEQ ID NO: 124385 - protein, 10 aa, synthetic construct
SKVRGDRGQI

SEQ ID NO: 124386 - protein, 10 aa, synthetic construct
SKPRGDRGQI

SEQ ID NO: 124387 - protein, 10 aa, synthetic construct
SKLRGDRGQI

SEQ ID NO: 124388 - protein, 10 aa, synthetic construct
SKIRGDRGQI

SEQ ID NO: 124389 - protein, 10 aa, synthetic construct
SKMRGDRGQI

SEQ ID NO: 124390 - protein, 10 aa, synthetic construct
SKWRGDRGQI

SEQ ID NO: 124391 - protein, 10 aa, synthetic construct
SKFRGDRGQI

SEQ ID NO: 124392 - protein, 10 aa, synthetic construct
SKKRGDRGQI

SEQ ID NO: 124393 - protein, 10 aa, synthetic construct
SKRRGDRGQI

SEQ ID NO: 124394 - protein, 10 aa, synthetic construct
SKHRGDRGQI

SEQ ID NO: 124395 - protein, 10 aa, synthetic construct
SKSRGDRGQI

SEQ ID NO: 124396 - protein, 10 aa, synthetic construct
SKTRGDRGQI

SEQ ID NO: 124397 - protein, 10 aa, synthetic construct
SKYRGDRGQI

SEQ ID NO: 124398 - protein, 10 aa, synthetic construct
SKNRGDRGQI

SEQ ID NO: 124399 - protein, 10 aa, synthetic construct
SKQRGDRGQI

SEQ ID NO: 124400 - protein, 10 aa, synthetic construct
SKDRGDRGQI

SEQ ID NO: 124401 - protein, 10 aa, synthetic construct
SKERGDRGQI

SEQ ID NO: 124402 - protein, 10 aa, synthetic construct
SRGRGDRGQI

SEQ ID NO: 124403 - protein, 10 aa, synthetic construct
SRARGDRGQI

SEQ ID NO: 124404 - protein, 10 aa, synthetic construct
SRVRGDRGQI

SEQ ID NO: 124405 - protein, 10 aa, synthetic construct
SRPRGDRGQI

SEQ ID NO: 124406 - protein, 10 aa, synthetic construct
SRLRGDRGQI

SEQ ID NO: 124407 - protein, 10 aa, synthetic construct
SRIRGDRGQI

SEQ ID NO: 124408 - protein, 10 aa, synthetic construct
SRMRGDRGQI

SEQ ID NO: 124409 - protein, 10 aa, synthetic construct
SRWRGDRGQI

SEQ ID NO: 124410 - protein, 10 aa, synthetic construct
SRFRGDRGQI

SEQ ID NO: 124411 - protein, 10 aa, synthetic construct
SRKRGDRGQI

SEQ ID NO: 124412 - protein, 10 aa, synthetic construct
SRRRGDRGQI

SEQ ID NO: 124413 - protein, 10 aa, synthetic construct
SRHRGDRGQI

SEQ ID NO: 124414 - protein, 10 aa, synthetic construct
SRSRGDRGQI

SEQ ID NO: 124415 - protein, 10 aa, synthetic construct
SRTRGDRGQI

SEQ ID NO: 124416 - protein, 10 aa, synthetic construct
SRYRGDRGQI

SEQ ID NO: 124417 - protein, 10 aa, synthetic construct
SRNRGDRGQI

SEQ ID NO: 124418 - protein, 10 aa, synthetic construct
SRQRGDRGQI

SEQ ID NO: 124419 - protein, 10 aa, synthetic construct
SRDRGDRGQI

SEQ ID NO: 124420 - protein, 10 aa, synthetic construct
SRERGDRGQI

SEQ ID NO: 124421 - protein, 10 aa, synthetic construct
SHGRGDRGQI

SEQ ID NO: 124422 - protein, 10 aa, synthetic construct
SHARGDRGQI

SEQ ID NO: 124423 - protein, 10 aa, synthetic construct
SHVRGDRGQI

SEQ ID NO: 124424 - protein, 10 aa, synthetic construct
SHPRGDRGQI

SEQ ID NO: 124425 - protein, 10 aa, synthetic construct
SHLRGDRGQI

SEQ ID NO: 124426 - protein, 10 aa, synthetic construct
SHIRGDRGQI

SEQ ID NO: 124427 - protein, 10 aa, synthetic construct
SHMRGDRGQI

SEQ ID NO: 124428 - protein, 10 aa, synthetic construct
SHWRGDRGQI

SEQ ID NO: 124429 - protein, 10 aa, synthetic construct
SHFRGDRGQI

SEQ ID NO: 124430 - protein, 10 aa, synthetic construct
SHKRGDRGQI

SEQ ID NO: 124431 - protein, 10 aa, synthetic construct
SHRRGDRGQI

SEQ ID NO: 124432 - protein, 10 aa, synthetic construct
SHHRGDRGQI

SEQ ID NO: 124433 - protein, 10 aa, synthetic construct
SHSRGDRGQI

SEQ ID NO: 124434 - protein, 10 aa, synthetic construct
SHTRGDRGQI

SEQ ID NO: 124435 - protein, 10 aa, synthetic construct
SHYRGDRGQI

SEQ ID NO: 124436 - protein, 10 aa, synthetic construct
SHNRGDRGQI

SEQ ID NO: 124437 - protein, 10 aa, synthetic construct
SHQRGDRGQI

SEQ ID NO: 124438 - protein, 10 aa, synthetic construct
SHDRGDRGQI

SEQ ID NO: 124439 - protein, 10 aa, synthetic construct
SHERGDRGQI

SEQ ID NO: 124440 - protein, 10 aa, synthetic construct
SSGRGDRGQI

SEQ ID NO: 124441 - protein, 10 aa, synthetic construct
SSARGDRGQI

SEQ ID NO: 124442 - protein, 10 aa, synthetic construct
SSVRGDRGQI

SEQ ID NO: 124443 - protein, 10 aa, synthetic construct
SSPRGDRGQI

SEQ ID NO: 124444 - protein, 10 aa, synthetic construct
SSLRGDRGQI

SEQ ID NO: 124445 - protein, 10 aa, synthetic construct
SSIRGDRGQI

SEQ ID NO: 124446 - protein, 10 aa, synthetic construct
SSMRGDRGQI

SEQ ID NO: 124447 - protein, 10 aa, synthetic construct
SSWRGDRGQI

SEQ ID NO: 124448 - protein, 10 aa, synthetic construct
SSFRGDRGQI

SEQ ID NO: 124449 - protein, 10 aa, synthetic construct
SSKRGDRGQI

SEQ ID NO: 124450 - protein, 10 aa, synthetic construct
SSRRGDRGQI

SEQ ID NO: 124451 - protein, 10 aa, synthetic construct
SSHRGDRGQI

SEQ ID NO: 124452 - protein, 10 aa, synthetic construct
SSSRGDRGQI

SEQ ID NO: 124453 - protein, 10 aa, synthetic construct
SSTRGDRGQI

SEQ ID NO: 124454 - protein, 10 aa, synthetic construct
SSYRGDRGQI

SEQ ID NO: 124455 - protein, 10 aa, synthetic construct
SSNRGDRGQI

SEQ ID NO: 124456 - protein, 10 aa, synthetic construct
SSQRGDRGQI

SEQ ID NO: 124457 - protein, 10 aa, synthetic construct
SSDRGDRGQI

SEQ ID NO: 124458 - protein, 10 aa, synthetic construct
SSERGDRGQI

SEQ ID NO: 124459 - protein, 10 aa, synthetic construct
STGRGDRGQI

SEQ ID NO: 124460 - protein, 10 aa, synthetic construct
STARGDRGQI

SEQ ID NO: 124461 - protein, 10 aa, synthetic construct
STVRGDRGQI

SEQ ID NO: 124462 - protein, 10 aa, synthetic construct
STPRGDRGQI

SEQ ID NO: 124463 - protein, 10 aa, synthetic construct
STLRGDRGQI

SEQ ID NO: 124464 - protein, 10 aa, synthetic construct
STIRGDRGQI

SEQ ID NO: 124465 - protein, 10 aa, synthetic construct
STMRGDRGQI

SEQ ID NO: 124466 - protein, 10 aa, synthetic construct
STWRGDRGQI

SEQ ID NO: 124467 - protein, 10 aa, synthetic construct
STFRGDRGQI

SEQ ID NO: 124468 - protein, 10 aa, synthetic construct
STKRGDRGQI

SEQ ID NO: 124469 - protein, 10 aa, synthetic construct
STRRGDRGQI

SEQ ID NO: 124470 - protein, 10 aa, synthetic construct
STHRGDRGQI

SEQ ID NO: 124471 - protein, 10 aa, synthetic construct
STSRGDRGQI

SEQ ID NO: 124472 - protein, 10 aa, synthetic construct
STTRGDRGQI

SEQ ID NO: 124473 - protein, 10 aa, synthetic construct
STYRGDRGQI

SEQ ID NO: 124474 - protein, 10 aa, synthetic construct
STNRGDRGQI

SEQ ID NO: 124475 - protein, 10 aa, synthetic construct
STQRGDRGQI

SEQ ID NO: 124476 - protein, 10 aa, synthetic construct
STDRGDRGQI

SEQ ID NO: 124477 - protein, 10 aa, synthetic construct
STERGDRGQI

SEQ ID NO: 124478 - protein, 10 aa, synthetic construct
SYGRGDRGQI

SEQ ID NO: 124479 - protein, 10 aa, synthetic construct
SYARGDRGQI

SEQ ID NO: 124480 - protein, 10 aa, synthetic construct
SYVRGDRGQI

SEQ ID NO: 124481 - protein, 10 aa, synthetic construct
SYPRGDRGQI

SEQ ID NO: 124482 - protein, 10 aa, synthetic construct
SYLRGDRGQI

SEQ ID NO: 124483 - protein, 10 aa, synthetic construct
SYIRGDRGQI

SEQ ID NO: 124484 - protein, 10 aa, synthetic construct
SYMRGDRGQI

SEQ ID NO: 124485 - protein, 10 aa, synthetic construct
SYWRGDRGQI

SEQ ID NO: 124486 - protein, 10 aa, synthetic construct
SYFRGDRGQI

SEQ ID NO: 124487 - protein, 10 aa, synthetic construct
SYKRGDRGQI

SEQ ID NO: 124488 - protein, 10 aa, synthetic construct
SYRRGDRGQI

SEQ ID NO: 124489 - protein, 10 aa, synthetic construct
SYHRGDRGQI

SEQ ID NO: 124490 - protein, 10 aa, synthetic construct
SYSRGDRGQI

SEQ ID NO: 124491 - protein, 10 aa, synthetic construct
SYTRGDRGQI

SEQ ID NO: 124492 - protein, 10 aa, synthetic construct
SYYRGDRGQI

SEQ ID NO: 124493 - protein, 10 aa, synthetic construct
SYNRGDRGQI

SEQ ID NO: 124494 - protein, 10 aa, synthetic construct
SYQRGDRGQI

SEQ ID NO: 124495 - protein, 10 aa, synthetic construct
SYDRGDRGQI

SEQ ID NO: 124496 - protein, 10 aa, synthetic construct
SYERGDRGQI

SEQ ID NO: 124497 - protein, 10 aa, synthetic construct
SNGRGDRGQI

SEQ ID NO: 124498 - protein, 10 aa, synthetic construct
SNARGDRGQI

SEQ ID NO: 124499 - protein, 10 aa, synthetic construct
SNVRGDRGQI

SEQ ID NO: 124500 - protein, 10 aa, synthetic construct
SNPRGDRGQI

SEQ ID NO: 124501 - protein, 10 aa, synthetic construct
SNLRGDRGQI

SEQ ID NO: 124502 - protein, 10 aa, synthetic construct
SNIRGDRGQI

SEQ ID NO: 124503 - protein, 10 aa, synthetic construct
SNMRGDRGQI

SEQ ID NO: 124504 - protein, 10 aa, synthetic construct
SNWRGDRGQI

SEQ ID NO: 124505 - protein, 10 aa, synthetic construct
SNFRGDRGQI

SEQ ID NO: 124506 - protein, 10 aa, synthetic construct
SNKRGDRGQI

SEQ ID NO: 124507 - protein, 10 aa, synthetic construct
SNRRGDRGQI

SEQ ID NO: 124508 - protein, 10 aa, synthetic construct
SNHRGDRGQI

SEQ ID NO: 124509 - protein, 10 aa, synthetic construct
SNSRGDRGQI

SEQ ID NO: 124510 - protein, 10 aa, synthetic construct
SNTRGDRGQI

SEQ ID NO: 124511 - protein, 10 aa, synthetic construct
SNYRGDRGQI

SEQ ID NO: 124512 - protein, 10 aa, synthetic construct
SNNRGDRGQI

SEQ ID NO: 124513 - protein, 10 aa, synthetic construct
SNQRGDRGQI

SEQ ID NO: 124514 - protein, 10 aa, synthetic construct
SNDRGDRGQI

SEQ ID NO: 124515 - protein, 10 aa, synthetic construct
SNERGDRGQI

SEQ ID NO: 124516 - protein, 10 aa, synthetic construct
SQGRGDRGQI

SEQ ID NO: 124517 - protein, 10 aa, synthetic construct
SQARGDRGQI

SEQ ID NO: 124518 - protein, 10 aa, synthetic construct
SQVRGDRGQI

SEQ ID NO: 124519 - protein, 10 aa, synthetic construct
SQPRGDRGQI

SEQ ID NO: 124520 - protein, 10 aa, synthetic construct
SQLRGDRGQI

SEQ ID NO: 124521 - protein, 10 aa, synthetic construct
SQIRGDRGQI

SEQ ID NO: 124522 - protein, 10 aa, synthetic construct
SQMRGDRGQI

SEQ ID NO: 124523 - protein, 10 aa, synthetic construct
SQWRGDRGQI

SEQ ID NO: 124524 - protein, 10 aa, synthetic construct
SQFRGDRGQI

SEQ ID NO: 124525 - protein, 10 aa, synthetic construct
SQKRGDRGQI

SEQ ID NO: 124526 - protein, 10 aa, synthetic construct
SQRRGDRGQI

SEQ ID NO: 124527 - protein, 10 aa, synthetic construct
SQHRGDRGQI

SEQ ID NO: 124528 - protein, 10 aa, synthetic construct
SQSRGDRGQI

SEQ ID NO: 124529 - protein, 10 aa, synthetic construct
SQTRGDRGQI

SEQ ID NO: 124530 - protein, 10 aa, synthetic construct
SQYRGDRGQI

SEQ ID NO: 124531 - protein, 10 aa, synthetic construct
SQNRGDRGQI

SEQ ID NO: 124532 - protein, 10 aa, synthetic construct
SQQRGDRGQI

SEQ ID NO: 124533 - protein, 10 aa, synthetic construct
SQDRGDRGQI

SEQ ID NO: 124534 - protein, 10 aa, synthetic construct
SQERGDRGQI

SEQ ID NO: 124535 - protein, 10 aa, synthetic construct
SDGRGDRGQI

SEQ ID NO: 124536 - protein, 10 aa, synthetic construct
SDARGDRGQI

SEQ ID NO: 124537 - protein, 10 aa, synthetic construct
SDVRGDRGQI

SEQ ID NO: 124538 - protein, 10 aa, synthetic construct
SDPRGDRGQI

SEQ ID NO: 124539 - protein, 10 aa, synthetic construct
SDLRGDRGQI

SEQ ID NO: 124540 - protein, 10 aa, synthetic construct
SDIRGDRGQI

SEQ ID NO: 124541 - protein, 10 aa, synthetic construct
SDMRGDRGQI

SEQ ID NO: 124542 - protein, 10 aa, synthetic construct
SDWRGDRGQI

SEQ ID NO: 124543 - protein, 10 aa, synthetic construct
SDFRGDRGQI

SEQ ID NO: 124544 - protein, 10 aa, synthetic construct
SDKRGDRGQI

SEQ ID NO: 124545 - protein, 10 aa, synthetic construct
SDRRGDRGQI

SEQ ID NO: 124546 - protein, 10 aa, synthetic construct
SDHRGDRGQI

SEQ ID NO: 124547 - protein, 10 aa, synthetic construct
SDSRGDRGQI

SEQ ID NO: 124548 - protein, 10 aa, synthetic construct
SDTRGDRGQI

SEQ ID NO: 124549 - protein, 10 aa, synthetic construct
SDYRGDRGQI

SEQ ID NO: 124550 - protein, 10 aa, synthetic construct
SDNRGDRGQI

SEQ ID NO: 124551 - protein, 10 aa, synthetic construct
SDQRGDRGQI

SEQ ID NO: 124552 - protein, 10 aa, synthetic construct
SDDRGDRGQI

SEQ ID NO: 124553 - protein, 10 aa, synthetic construct
SDERGDRGQI

SEQ ID NO: 124554 - protein, 10 aa, synthetic construct
SEGRGDRGQI

SEQ ID NO: 124555 - protein, 10 aa, synthetic construct
SEARGDRGQI

SEQ ID NO: 124556 - protein, 10 aa, synthetic construct
SEVRGDRGQI

SEQ ID NO: 124557 - protein, 10 aa, synthetic construct
SEPRGDRGQI

SEQ ID NO: 124558 - protein, 10 aa, synthetic construct
SELRGDRGQI

SEQ ID NO: 124559 - protein, 10 aa, synthetic construct
SEIRGDRGQI

SEQ ID NO: 124560 - protein, 10 aa, synthetic construct
SEMRGDRGQI

SEQ ID NO: 124561 - protein, 10 aa, synthetic construct
SEWRGDRGQI

SEQ ID NO: 124562 - protein, 10 aa, synthetic construct
SEFRGDRGQI

SEQ ID NO: 124563 - protein, 10 aa, synthetic construct
SEKRGDRGQI

SEQ ID NO: 124564 - protein, 10 aa, synthetic construct
SERRGDRGQI

SEQ ID NO: 124565 - protein, 10 aa, synthetic construct
SEHRGDRGQI

SEQ ID NO: 124566 - protein, 10 aa, synthetic construct
SESRGDRGQI

SEQ ID NO: 124567 - protein, 10 aa, synthetic construct
SETRGDRGQI

SEQ ID NO: 124568 - protein, 10 aa, synthetic construct
SEYRGDRGQI

SEQ ID NO: 124569 - protein, 10 aa, synthetic construct
SENRGDRGQI

SEQ ID NO: 124570 - protein, 10 aa, synthetic construct
SEQRGDRGQI

SEQ ID NO: 124571 - protein, 10 aa, synthetic construct
SEDRGDRGQI

SEQ ID NO: 124572 - protein, 10 aa, synthetic construct
SEERGDRGQI

SEQ ID NO: 124573 - protein, 10 aa, synthetic construct
TGGRGDRGQI

SEQ ID NO: 124574 - protein, 10 aa, synthetic construct
TGARGDRGQI

SEQ ID NO: 124575 - protein, 10 aa, synthetic construct
TGVRGDRGQI

SEQ ID NO: 124576 - protein, 10 aa, synthetic construct
TGPRGDRGQI

SEQ ID NO: 124577 - protein, 10 aa, synthetic construct
TGLRGDRGQI

SEQ ID NO: 124578 - protein, 10 aa, synthetic construct
TGIRGDRGQI

SEQ ID NO: 124579 - protein, 10 aa, synthetic construct
TGMRGDRGQI

SEQ ID NO: 124580 - protein, 10 aa, synthetic construct
TGWRGDRGQI

SEQ ID NO: 124581 - protein, 10 aa, synthetic construct
TGFRGDRGQI

SEQ ID NO: 124582 - protein, 10 aa, synthetic construct
TGKRGDRGQI

SEQ ID NO: 124583 - protein, 10 aa, synthetic construct
TGRRGDRGQI

SEQ ID NO: 124584 - protein, 10 aa, synthetic construct
TGHRGDRGQI

SEQ ID NO: 124585 - protein, 10 aa, synthetic construct
TGSRGDRGQI

SEQ ID NO: 124586 - protein, 10 aa, synthetic construct
TGTRGDRGQI

SEQ ID NO: 124587 - protein, 10 aa, synthetic construct
TGYRGDRGQI

SEQ ID NO: 124588 - protein, 10 aa, synthetic construct
TGNRGDRGQI

SEQ ID NO: 124589 - protein, 10 aa, synthetic construct
TGQRGDRGQI

SEQ ID NO: 124590 - protein, 10 aa, synthetic construct
TGDRGDRGQI

SEQ ID NO: 124591 - protein, 10 aa, synthetic construct
TGERGDRGQI

SEQ ID NO: 124592 - protein, 10 aa, synthetic construct
TAGRGDRGQI

SEQ ID NO: 124593 - protein, 10 aa, synthetic construct
TAARGDRGQI

SEQ ID NO: 124594 - protein, 10 aa, synthetic construct
TAVRGDRGQI

SEQ ID NO: 124595 - protein, 10 aa, synthetic construct
TAPRGDRGQI

SEQ ID NO: 124596 - protein, 10 aa, synthetic construct
TALRGDRGQI

SEQ ID NO: 124597 - protein, 10 aa, synthetic construct
TAIRGDRGQI

SEQ ID NO: 124598 - protein, 10 aa, synthetic construct
TAMRGDRGQI

SEQ ID NO: 124599 - protein, 10 aa, synthetic construct
TAWRGDRGQI

SEQ ID NO: 124600 - protein, 10 aa, synthetic construct
TAFRGDRGQI

SEQ ID NO: 124601 - protein, 10 aa, synthetic construct
TAKRGDRGQI

SEQ ID NO: 124602 - protein, 10 aa, synthetic construct
TARRGDRGQI

SEQ ID NO: 124603 - protein, 10 aa, synthetic construct
TAHRGDRGQI

SEQ ID NO: 124604 - protein, 10 aa, synthetic construct
TASRGDRGQI

SEQ ID NO: 124605 - protein, 10 aa, synthetic construct
TATRGDRGQI

SEQ ID NO: 124606 - protein, 10 aa, synthetic construct
TAYRGDRGQI

SEQ ID NO: 124607 - protein, 10 aa, synthetic construct
TANRGDRGQI

SEQ ID NO: 124608 - protein, 10 aa, synthetic construct
TAQRGDRGQI

SEQ ID NO: 124609 - protein, 10 aa, synthetic construct
TADRGDRGQI

SEQ ID NO: 124610 - protein, 10 aa, synthetic construct
TAERGDRGQI

SEQ ID NO: 124611 - protein, 10 aa, synthetic construct
TVGRGDRGQI

SEQ ID NO: 124612 - protein, 10 aa, synthetic construct
TVARGDRGQI

SEQ ID NO: 124613 - protein, 10 aa, synthetic construct
TVVRGDRGQI

SEQ ID NO: 124614 - protein, 10 aa, synthetic construct
TVPRGDRGQI

SEQ ID NO: 124615 - protein, 10 aa, synthetic construct
TVLRGDRGQI

SEQ ID NO: 124616 - protein, 10 aa, synthetic construct
TVIRGDRGQI

SEQ ID NO: 124617 - protein, 10 aa, synthetic construct
TVMRGDRGQI

SEQ ID NO: 124618 - protein, 10 aa, synthetic construct
TVWRGDRGQI

SEQ ID NO: 124619 - protein, 10 aa, synthetic construct
TVFRGDRGQI

SEQ ID NO: 124620 - protein, 10 aa, synthetic construct
TVKRGDRGQI

SEQ ID NO: 124621 - protein, 10 aa, synthetic construct
TVRRGDRGQI

SEQ ID NO: 124622 - protein, 10 aa, synthetic construct
TVHRGDRGQI

SEQ ID NO: 124623 - protein, 10 aa, synthetic construct
TVSRGDRGQI

SEQ ID NO: 124624 - protein, 10 aa, synthetic construct
TVTRGDRGQI

SEQ ID NO: 124625 - protein, 10 aa, synthetic construct
TVYRGDRGQI

SEQ ID NO: 124626 - protein, 10 aa, synthetic construct
TVNRGDRGQI

SEQ ID NO: 124627 - protein, 10 aa, synthetic construct
TVQRGDRGQI

SEQ ID NO: 124628 - protein, 10 aa, synthetic construct
TVDRGDRGQI

SEQ ID NO: 124629 - protein, 10 aa, synthetic construct
TVERGDRGQI

SEQ ID NO: 124630 - protein, 10 aa, synthetic construct
TPGRGDRGQI

SEQ ID NO: 124631 - protein, 10 aa, synthetic construct
TPARGDRGQI

SEQ ID NO: 124632 - protein, 10 aa, synthetic construct
TPVRGDRGQI

SEQ ID NO: 124633 - protein, 10 aa, synthetic construct
TPPRGDRGQI

SEQ ID NO: 124634 - protein, 10 aa, synthetic construct
TPLRGDRGQI

SEQ ID NO: 124635 - protein, 10 aa, synthetic construct
TPIRGDRGQI

SEQ ID NO: 124636 - protein, 10 aa, synthetic construct
TPMRGDRGQI

SEQ ID NO: 124637 - protein, 10 aa, synthetic construct
TPWRGDRGQI

SEQ ID NO: 124638 - protein, 10 aa, synthetic construct
TPFRGDRGQI

SEQ ID NO: 124639 - protein, 10 aa, synthetic construct
TPKRGDRGQI

SEQ ID NO: 124640 - protein, 10 aa, synthetic construct
TPRRGDRGQI

SEQ ID NO: 124641 - protein, 10 aa, synthetic construct
TPHRGDRGQI

SEQ ID NO: 124642 - protein, 10 aa, synthetic construct
TPSRGDRGQI

SEQ ID NO: 124643 - protein, 10 aa, synthetic construct
TPTRGDRGQI

SEQ ID NO: 124644 - protein, 10 aa, synthetic construct
TPYRGDRGQI

SEQ ID NO: 124645 - protein, 10 aa, synthetic construct
TPNRGDRGQI

SEQ ID NO: 124646 - protein, 10 aa, synthetic construct
TPQRGDRGQI

SEQ ID NO: 124647 - protein, 10 aa, synthetic construct
TPDRGDRGQI

SEQ ID NO: 124648 - protein, 10 aa, synthetic construct
TPERGDRGQI

SEQ ID NO: 124649 - protein, 10 aa, synthetic construct
TLGRGDRGQI

SEQ ID NO: 124650 - protein, 10 aa, synthetic construct
TLARGDRGQI

SEQ ID NO: 124651 - protein, 10 aa, synthetic construct
TLVRGDRGQI

SEQ ID NO: 124652 - protein, 10 aa, synthetic construct
TLPRGDRGQI

SEQ ID NO: 124653 - protein, 10 aa, synthetic construct
TLLRGDRGQI

SEQ ID NO: 124654 - protein, 10 aa, synthetic construct
TLIRGDRGQI

SEQ ID NO: 124655 - protein, 10 aa, synthetic construct
TLMRGDRGQI

SEQ ID NO: 124656 - protein, 10 aa, synthetic construct
TLWRGDRGQI

SEQ ID NO: 124657 - protein, 10 aa, synthetic construct
TLFRGDRGQI

SEQ ID NO: 124658 - protein, 10 aa, synthetic construct
TLKRGDRGQI

SEQ ID NO: 124659 - protein, 10 aa, synthetic construct
TLRRGDRGQI

SEQ ID NO: 124660 - protein, 10 aa, synthetic construct
TLHRGDRGQI

SEQ ID NO: 124661 - protein, 10 aa, synthetic construct
TLSRGDRGQI

SEQ ID NO: 124662 - protein, 10 aa, synthetic construct
TLTRGDRGQI

SEQ ID NO: 124663 - protein, 10 aa, synthetic construct
TLYRGDRGQI

SEQ ID NO: 124664 - protein, 10 aa, synthetic construct
TLNRGDRGQI

SEQ ID NO: 124665 - protein, 10 aa, synthetic construct
TLQRGDRGQI

SEQ ID NO: 124666 - protein, 10 aa, synthetic construct
TLDRGDRGQI

SEQ ID NO: 124667 - protein, 10 aa, synthetic construct
TLERGDRGQI

SEQ ID NO: 124668 - protein, 10 aa, synthetic construct
TIGRGDRGQI

SEQ ID NO: 124669 - protein, 10 aa, synthetic construct
TIARGDRGQI

SEQ ID NO: 124670 - protein, 10 aa, synthetic construct
TIVRGDRGQI

SEQ ID NO: 124671 - protein, 10 aa, synthetic construct
TIPRGDRGQI

SEQ ID NO: 124672 - protein, 10 aa, synthetic construct
TILRGDRGQI

SEQ ID NO: 124673 - protein, 10 aa, synthetic construct
TIIRGDRGQI

SEQ ID NO: 124674 - protein, 10 aa, synthetic construct
TIMRGDRGQI

SEQ ID NO: 124675 - protein, 10 aa, synthetic construct
TIWRGDRGQI

SEQ ID NO: 124676 - protein, 10 aa, synthetic construct
TIFRGDRGQI

SEQ ID NO: 124677 - protein, 10 aa, synthetic construct
TIKRGDRGQI

SEQ ID NO: 124678 - protein, 10 aa, synthetic construct
TIRRGDRGQI

SEQ ID NO: 124679 - protein, 10 aa, synthetic construct
TIHRGDRGQI

SEQ ID NO: 124680 - protein, 10 aa, synthetic construct
TISRGDRGQI

SEQ ID NO: 124681 - protein, 10 aa, synthetic construct
TITRGDRGQI

SEQ ID NO: 124682 - protein, 10 aa, synthetic construct
TIYRGDRGQI

SEQ ID NO: 124683 - protein, 10 aa, synthetic construct
TINRGDRGQI

SEQ ID NO: 124684 - protein, 10 aa, synthetic construct
TIQRGDRGQI

SEQ ID NO: 124685 - protein, 10 aa, synthetic construct
TIDRGDRGQI

SEQ ID NO: 124686 - protein, 10 aa, synthetic construct
TIERGDRGQI

SEQ ID NO: 124687 - protein, 10 aa, synthetic construct
TMGRGDRGQI

SEQ ID NO: 124688 - protein, 10 aa, synthetic construct
TMARGDRGQI

SEQ ID NO: 124689 - protein, 10 aa, synthetic construct
TMVRGDRGQI

SEQ ID NO: 124690 - protein, 10 aa, synthetic construct
TMPRGDRGQI

SEQ ID NO: 124691 - protein, 10 aa, synthetic construct
TMLRGDRGQI

SEQ ID NO: 124692 - protein, 10 aa, synthetic construct
TMIRGDRGQI

SEQ ID NO: 124693 - protein, 10 aa, synthetic construct
TMMRGDRGQI

SEQ ID NO: 124694 - protein, 10 aa, synthetic construct
TMWRGDRGQI

SEQ ID NO: 124695 - protein, 10 aa, synthetic construct
TMFRGDRGQI

SEQ ID NO: 124696 - protein, 10 aa, synthetic construct
TMKRGDRGQI

SEQ ID NO: 124697 - protein, 10 aa, synthetic construct
TMRRGDRGQI

SEQ ID NO: 124698 - protein, 10 aa, synthetic construct
TMHRGDRGQI

SEQ ID NO: 124699 - protein, 10 aa, synthetic construct
TMSRGDRGQI

SEQ ID NO: 124700 - protein, 10 aa, synthetic construct
TMTRGDRGQI

SEQ ID NO: 124701 - protein, 10 aa, synthetic construct
TMYRGDRGQI

SEQ ID NO: 124702 - protein, 10 aa, synthetic construct
TMNRGDRGQI

SEQ ID NO: 124703 - protein, 10 aa, synthetic construct
TMQRGDRGQI

SEQ ID NO: 124704 - protein, 10 aa, synthetic construct
TMDRGDRGQI

SEQ ID NO: 124705 - protein, 10 aa, synthetic construct
TMERGDRGQI

SEQ ID NO: 124706 - protein, 10 aa, synthetic construct
TWGRGDRGQI

SEQ ID NO: 124707 - protein, 10 aa, synthetic construct
TWARGDRGQI

SEQ ID NO: 124708 - protein, 10 aa, synthetic construct
TWVRGDRGQI

SEQ ID NO: 124709 - protein, 10 aa, synthetic construct
TWPRGDRGQI

SEQ ID NO: 124710 - protein, 10 aa, synthetic construct
TWLRGDRGQI

SEQ ID NO: 124711 - protein, 10 aa, synthetic construct
TWIRGDRGQI

SEQ ID NO: 124712 - protein, 10 aa, synthetic construct
TWMRGDRGQI

SEQ ID NO: 124713 - protein, 10 aa, synthetic construct
TWWRGDRGQI

SEQ ID NO: 124714 - protein, 10 aa, synthetic construct
TWFRGDRGQI

SEQ ID NO: 124715 - protein, 10 aa, synthetic construct
TWKRGDRGQI

SEQ ID NO: 124716 - protein, 10 aa, synthetic construct
TWRRGDRGQI

SEQ ID NO: 124717 - protein, 10 aa, synthetic construct
TWHRGDRGQI

SEQ ID NO: 124718 - protein, 10 aa, synthetic construct
TWSRGDRGQI

SEQ ID NO: 124719 - protein, 10 aa, synthetic construct
TWTRGDRGQI

SEQ ID NO: 124720 - protein, 10 aa, synthetic construct
TWYRGDRGQI

SEQ ID NO: 124721 - protein, 10 aa, synthetic construct
TWNRGDRGQI

SEQ ID NO: 124722 - protein, 10 aa, synthetic construct
TWQRGDRGQI

SEQ ID NO: 124723 - protein, 10 aa, synthetic construct
TWDRGDRGQI

SEQ ID NO: 124724 - protein, 10 aa, synthetic construct
TWERGDRGQI

SEQ ID NO: 124725 - protein, 10 aa, synthetic construct
TFGRGDRGQI

SEQ ID NO: 124726 - protein, 10 aa, synthetic construct
TFARGDRGQI

SEQ ID NO: 124727 - protein, 10 aa, synthetic construct
TFVRGDRGQI

SEQ ID NO: 124728 - protein, 10 aa, synthetic construct
TFPRGDRGQI

SEQ ID NO: 124729 - protein, 10 aa, synthetic construct
TFLRGDRGQI

SEQ ID NO: 124730 - protein, 10 aa, synthetic construct
TFIRGDRGQI

SEQ ID NO: 124731 - protein, 10 aa, synthetic construct
TFMRGDRGQI

SEQ ID NO: 124732 - protein, 10 aa, synthetic construct
TFWRGDRGQI

SEQ ID NO: 124733 - protein, 10 aa, synthetic construct
TFFRGDRGQI

SEQ ID NO: 124734 - protein, 10 aa, synthetic construct
TFKRGDRGQI

SEQ ID NO: 124735 - protein, 10 aa, synthetic construct
TFRRGDRGQI

SEQ ID NO: 124736 - protein, 10 aa, synthetic construct
TFHRGDRGQI

SEQ ID NO: 124737 - protein, 10 aa, synthetic construct
TFSRGDRGQI

SEQ ID NO: 124738 - protein, 10 aa, synthetic construct
TFTRGDRGQI

SEQ ID NO: 124739 - protein, 10 aa, synthetic construct
TFYRGDRGQI

SEQ ID NO: 124740 - protein, 10 aa, synthetic construct
TFNRGDRGQI

SEQ ID NO: 124741 - protein, 10 aa, synthetic construct
TFQRGDRGQI

SEQ ID NO: 124742 - protein, 10 aa, synthetic construct
TFDRGDRGQI

SEQ ID NO: 124743 - protein, 10 aa, synthetic construct
TFERGDRGQI

SEQ ID NO: 124744 - protein, 10 aa, synthetic construct
TKGRGDRGQI

SEQ ID NO: 124745 - protein, 10 aa, synthetic construct
TKARGDRGQI

SEQ ID NO: 124746 - protein, 10 aa, synthetic construct
TKVRGDRGQI

SEQ ID NO: 124747 - protein, 10 aa, synthetic construct
TKPRGDRGQI

SEQ ID NO: 124748 - protein, 10 aa, synthetic construct
TKLRGDRGQI

SEQ ID NO: 124749 - protein, 10 aa, synthetic construct
TKIRGDRGQI

SEQ ID NO: 124750 - protein, 10 aa, synthetic construct
TKMRGDRGQI

SEQ ID NO: 124751 - protein, 10 aa, synthetic construct
TKWRGDRGQI

SEQ ID NO: 124752 - protein, 10 aa, synthetic construct
TKFRGDRGQI

SEQ ID NO: 124753 - protein, 10 aa, synthetic construct
TKKRGDRGQI

SEQ ID NO: 124754 - protein, 10 aa, synthetic construct
TKRRGDRGQI

SEQ ID NO: 124755 - protein, 10 aa, synthetic construct
TKHRGDRGQI

SEQ ID NO: 124756 - protein, 10 aa, synthetic construct
TKSRGDRGQI

SEQ ID NO: 124757 - protein, 10 aa, synthetic construct
TKTRGDRGQI

SEQ ID NO: 124758 - protein, 10 aa, synthetic construct
TKYRGDRGQI

SEQ ID NO: 124759 - protein, 10 aa, synthetic construct
TKNRGDRGQI

SEQ ID NO: 124760 - protein, 10 aa, synthetic construct
TKQRGDRGQI

SEQ ID NO: 124761 - protein, 10 aa, synthetic construct
TKDRGDRGQI

SEQ ID NO: 124762 - protein, 10 aa, synthetic construct
TKERGDRGQI

SEQ ID NO: 124763 - protein, 10 aa, synthetic construct
TRGRGDRGQI

SEQ ID NO: 124764 - protein, 10 aa, synthetic construct
TRARGDRGQI

SEQ ID NO: 124765 - protein, 10 aa, synthetic construct
TRVRGDRGQI

SEQ ID NO: 124766 - protein, 10 aa, synthetic construct
TRPRGDRGQI

SEQ ID NO: 124767 - protein, 10 aa, synthetic construct
TRLRGDRGQI

SEQ ID NO: 124768 - protein, 10 aa, synthetic construct
TRIRGDRGQI

SEQ ID NO: 124769 - protein, 10 aa, synthetic construct
TRMRGDRGQI

SEQ ID NO: 124770 - protein, 10 aa, synthetic construct
TRWRGDRGQI

SEQ ID NO: 124771 - protein, 10 aa, synthetic construct
TRFRGDRGQI

SEQ ID NO: 124772 - protein, 10 aa, synthetic construct
TRKRGDRGQI

SEQ ID NO: 124773 - protein, 10 aa, synthetic construct
TRRRGDRGQI

SEQ ID NO: 124774 - protein, 10 aa, synthetic construct
TRHRGDRGQI

SEQ ID NO: 124775 - protein, 10 aa, synthetic construct
TRSRGDRGQI

SEQ ID NO: 124776 - protein, 10 aa, synthetic construct
TRTRGDRGQI

SEQ ID NO: 124777 - protein, 10 aa, synthetic construct
TRYRGDRGQI

SEQ ID NO: 124778 - protein, 10 aa, synthetic construct
TRNRGDRGQI

SEQ ID NO: 124779 - protein, 10 aa, synthetic construct
TRQRGDRGQI

SEQ ID NO: 124780 - protein, 10 aa, synthetic construct
TRDRGDRGQI

SEQ ID NO: 124781 - protein, 10 aa, synthetic construct
TRERGDRGQI

SEQ ID NO: 124782 - protein, 10 aa, synthetic construct
THGRGDRGQI

SEQ ID NO: 124783 - protein, 10 aa, synthetic construct
THARGDRGQI

SEQ ID NO: 124784 - protein, 10 aa, synthetic construct
THVRGDRGQI

SEQ ID NO: 124785 - protein, 10 aa, synthetic construct
THPRGDRGQI

SEQ ID NO: 124786 - protein, 10 aa, synthetic construct
THLRGDRGQI

SEQ ID NO: 124787 - protein, 10 aa, synthetic construct
THIRGDRGQI

SEQ ID NO: 124788 - protein, 10 aa, synthetic construct
THMRGDRGQI

SEQ ID NO: 124789 - protein, 10 aa, synthetic construct
THWRGDRGQI

SEQ ID NO: 124790 - protein, 10 aa, synthetic construct
THFRGDRGQI

SEQ ID NO: 124791 - protein, 10 aa, synthetic construct
THKRGDRGQI

SEQ ID NO: 124792 - protein, 10 aa, synthetic construct
THRRGDRGQI

SEQ ID NO: 124793 - protein, 10 aa, synthetic construct
THHRGDRGQI

SEQ ID NO: 124794 - protein, 10 aa, synthetic construct
THSRGDRGQI

SEQ ID NO: 124795 - protein, 10 aa, synthetic construct
THTRGDRGQI

SEQ ID NO: 124796 - protein, 10 aa, synthetic construct
THYRGDRGQI

SEQ ID NO: 124797 - protein, 10 aa, synthetic construct
THNRGDRGQI

SEQ ID NO: 124798 - protein, 10 aa, synthetic construct
THQRGDRGQI

SEQ ID NO: 124799 - protein, 10 aa, synthetic construct
THDRGDRGQI

SEQ ID NO: 124800 - protein, 10 aa, synthetic construct
THERGDRGQI

SEQ ID NO: 124801 - protein, 10 aa, synthetic construct
TSGRGDRGQI

SEQ ID NO: 124802 - protein, 10 aa, synthetic construct
TSARGDRGQI

SEQ ID NO: 124803 - protein, 10 aa, synthetic construct
TSVRGDRGQI

SEQ ID NO: 124804 - protein, 10 aa, synthetic construct
TSPRGDRGQI

SEQ ID NO: 124805 - protein, 10 aa, synthetic construct
TSLRGDRGQI

SEQ ID NO: 124806 - protein, 10 aa, synthetic construct
TSIRGDRGQI

SEQ ID NO: 124807 - protein, 10 aa, synthetic construct
TSMRGDRGQI

SEQ ID NO: 124808 - protein, 10 aa, synthetic construct
TSWRGDRGQI

SEQ ID NO: 124809 - protein, 10 aa, synthetic construct
TSFRGDRGQI

SEQ ID NO: 124810 - protein, 10 aa, synthetic construct
TSKRGDRGQI

SEQ ID NO: 124811 - protein, 10 aa, synthetic construct
TSRRGDRGQI

SEQ ID NO: 124812 - protein, 10 aa, synthetic construct
TSHRGDRGQI

SEQ ID NO: 124813 - protein, 10 aa, synthetic construct
TSSRGDRGQI

SEQ ID NO: 124814 - protein, 10 aa, synthetic construct
TSTRGDRGQI

SEQ ID NO: 124815 - protein, 10 aa, synthetic construct
TSYRGDRGQI

SEQ ID NO: 124816 - protein, 10 aa, synthetic construct
TSNRGDRGQI

SEQ ID NO: 124817 - protein, 10 aa, synthetic construct
TSQRGDRGQI

SEQ ID NO: 124818 - protein, 10 aa, synthetic construct
TSDRGDRGQI

SEQ ID NO: 124819 - protein, 10 aa, synthetic construct
TSERGDRGQI

SEQ ID NO: 124820 - protein, 10 aa, synthetic construct
TTGRGDRGQI

SEQ ID NO: 124821 - protein, 10 aa, synthetic construct
TTARGDRGQI

SEQ ID NO: 124822 - protein, 10 aa, synthetic construct
TTVRGDRGQI

SEQ ID NO: 124823 - protein, 10 aa, synthetic construct
TTPRGDRGQI

SEQ ID NO: 124824 - protein, 10 aa, synthetic construct
TTLRGDRGQI

SEQ ID NO: 124825 - protein, 10 aa, synthetic construct
TTIRGDRGQI

SEQ ID NO: 124826 - protein, 10 aa, synthetic construct
TTMRGDRGQI

SEQ ID NO: 124827 - protein, 10 aa, synthetic construct
TTWRGDRGQI

SEQ ID NO: 124828 - protein, 10 aa, synthetic construct
TTFRGDRGQI

SEQ ID NO: 124829 - protein, 10 aa, synthetic construct
TTKRGDRGQI

SEQ ID NO: 124830 - protein, 10 aa, synthetic construct
TTRRGDRGQI

SEQ ID NO: 124831 - protein, 10 aa, synthetic construct
TTHRGDRGQI

SEQ ID NO: 124832 - protein, 10 aa, synthetic construct
TTSRGDRGQI

SEQ ID NO: 124833 - protein, 10 aa, synthetic construct
TTTRGDRGQI

SEQ ID NO: 124834 - protein, 10 aa, synthetic construct
TTYRGDRGQI

SEQ ID NO: 124835 - protein, 10 aa, synthetic construct
TTNRGDRGQI

SEQ ID NO: 124836 - protein, 10 aa, synthetic construct
TTQRGDRGQI

SEQ ID NO: 124837 - protein, 10 aa, synthetic construct
TTDRGDRGQI

SEQ ID NO: 124838 - protein, 10 aa, synthetic construct
TTERGDRGQI

SEQ ID NO: 124839 - protein, 10 aa, synthetic construct
TYGRGDRGQI

SEQ ID NO: 124840 - protein, 10 aa, synthetic construct
TYARGDRGQI

SEQ ID NO: 124841 - protein, 10 aa, synthetic construct
TYVRGDRGQI

SEQ ID NO: 124842 - protein, 10 aa, synthetic construct
TYPRGDRGQI

SEQ ID NO: 124843 - protein, 10 aa, synthetic construct
TYLRGDRGQI

SEQ ID NO: 124844 - protein, 10 aa, synthetic construct
TYIRGDRGQI

SEQ ID NO: 124845 - protein, 10 aa, synthetic construct
TYMRGDRGQI

SEQ ID NO: 124846 - protein, 10 aa, synthetic construct
TYWRGDRGQI

SEQ ID NO: 124847 - protein, 10 aa, synthetic construct
TYFRGDRGQI

SEQ ID NO: 124848 - protein, 10 aa, synthetic construct
TYKRGDRGQI

SEQ ID NO: 124849 - protein, 10 aa, synthetic construct
TYRRGDRGQI

SEQ ID NO: 124850 - protein, 10 aa, synthetic construct
TYHRGDRGQI

SEQ ID NO: 124851 - protein, 10 aa, synthetic construct
TYSRGDRGQI

SEQ ID NO: 124852 - protein, 10 aa, synthetic construct
TYTRGDRGQI

SEQ ID NO: 124853 - protein, 10 aa, synthetic construct
TYYRGDRGQI

SEQ ID NO: 124854 - protein, 10 aa, synthetic construct
TYNRGDRGQI

SEQ ID NO: 124855 - protein, 10 aa, synthetic construct
TYQRGDRGQI

SEQ ID NO: 124856 - protein, 10 aa, synthetic construct
TYDRGDRGQI

SEQ ID NO: 124857 - protein, 10 aa, synthetic construct
TYERGDRGQI

SEQ ID NO: 124858 - protein, 10 aa, synthetic construct
TNGRGDRGQI

SEQ ID NO: 124859 - protein, 10 aa, synthetic construct
TNARGDRGQI

SEQ ID NO: 124860 - protein, 10 aa, synthetic construct
TNVRGDRGQI

SEQ ID NO: 124861 - protein, 10 aa, synthetic construct
TNPRGDRGQI

SEQ ID NO: 124862 - protein, 10 aa, synthetic construct
TNLRGDRGQI

SEQ ID NO: 124863 - protein, 10 aa, synthetic construct
TNIRGDRGQI

SEQ ID NO: 124864 - protein, 10 aa, synthetic construct
TNMRGDRGQI

SEQ ID NO: 124865 - protein, 10 aa, synthetic construct
TNWRGDRGQI

SEQ ID NO: 124866 - protein, 10 aa, synthetic construct
TNFRGDRGQI

SEQ ID NO: 124867 - protein, 10 aa, synthetic construct
TNKRGDRGQI

SEQ ID NO: 124868 - protein, 10 aa, synthetic construct
TNRRGDRGQI

SEQ ID NO: 124869 - protein, 10 aa, synthetic construct
TNHRGDRGQI

SEQ ID NO: 124870 - protein, 10 aa, synthetic construct
TNSRGDRGQI

SEQ ID NO: 124871 - protein, 10 aa, synthetic construct
TNTRGDRGQI

SEQ ID NO: 124872 - protein, 10 aa, synthetic construct
TNYRGDRGQI

SEQ ID NO: 124873 - protein, 10 aa, synthetic construct
TNNRGDRGQI

SEQ ID NO: 124874 - protein, 10 aa, synthetic construct
TNQRGDRGQI

SEQ ID NO: 124875 - protein, 10 aa, synthetic construct
TNDRGDRGQI

SEQ ID NO: 124876 - protein, 10 aa, synthetic construct
TNERGDRGQI

SEQ ID NO: 124877 - protein, 10 aa, synthetic construct
TQGRGDRGQI

SEQ ID NO: 124878 - protein, 10 aa, synthetic construct
TQARGDRGQI

SEQ ID NO: 124879 - protein, 10 aa, synthetic construct
TQVRGDRGQI

SEQ ID NO: 124880 - protein, 10 aa, synthetic construct
TQPRGDRGQI

SEQ ID NO: 124881 - protein, 10 aa, synthetic construct
TQLRGDRGQI

SEQ ID NO: 124882 - protein, 10 aa, synthetic construct
TQIRGDRGQI

SEQ ID NO: 124883 - protein, 10 aa, synthetic construct
TQMRGDRGQI

SEQ ID NO: 124884 - protein, 10 aa, synthetic construct
TQWRGDRGQI

SEQ ID NO: 124885 - protein, 10 aa, synthetic construct
TQFRGDRGQI

SEQ ID NO: 124886 - protein, 10 aa, synthetic construct
TQKRGDRGQI

SEQ ID NO: 124887 - protein, 10 aa, synthetic construct
TQRRGDRGQI

SEQ ID NO: 124888 - protein, 10 aa, synthetic construct
TQHRGDRGQI

SEQ ID NO: 124889 - protein, 10 aa, synthetic construct
TQSRGDRGQI

SEQ ID NO: 124890 - protein, 10 aa, synthetic construct
TQTRGDRGQI

SEQ ID NO: 124891 - protein, 10 aa, synthetic construct
TQYRGDRGQI

SEQ ID NO: 124892 - protein, 10 aa, synthetic construct
TQNRGDRGQI

SEQ ID NO: 124893 - protein, 10 aa, synthetic construct
TQQRGDRGQI

SEQ ID NO: 124894 - protein, 10 aa, synthetic construct
TQDRGDRGQI

SEQ ID NO: 124895 - protein, 10 aa, synthetic construct
TQERGDRGQI

SEQ ID NO: 124896 - protein, 10 aa, synthetic construct
TDGRGDRGQI

SEQ ID NO: 124897 - protein, 10 aa, synthetic construct
TDARGDRGQI

SEQ ID NO: 124898 - protein, 10 aa, synthetic construct
TDVRGDRGQI

SEQ ID NO: 124899 - protein, 10 aa, synthetic construct
TDPRGDRGQI

SEQ ID NO: 124900 - protein, 10 aa, synthetic construct
TDLRGDRGQI

SEQ ID NO: 124901 - protein, 10 aa, synthetic construct
TDIRGDRGQI

SEQ ID NO: 124902 - protein, 10 aa, synthetic construct
TDMRGDRGQI

SEQ ID NO: 124903 - protein, 10 aa, synthetic construct
TDWRGDRGQI

SEQ ID NO: 124904 - protein, 10 aa, synthetic construct
TDFRGDRGQI

SEQ ID NO: 124905 - protein, 10 aa, synthetic construct
TDKRGDRGQI

SEQ ID NO: 124906 - protein, 10 aa, synthetic construct
TDRRGDRGQI

SEQ ID NO: 124907 - protein, 10 aa, synthetic construct
TDHRGDRGQI

SEQ ID NO: 124908 - protein, 10 aa, synthetic construct
TDSRGDRGQI

SEQ ID NO: 124909 - protein, 10 aa, synthetic construct
TDTRGDRGQI

SEQ ID NO: 124910 - protein, 10 aa, synthetic construct
TDYRGDRGQI

SEQ ID NO: 124911 - protein, 10 aa, synthetic construct
TDNRGDRGQI

SEQ ID NO: 124912 - protein, 10 aa, synthetic construct
TDQRGDRGQI

SEQ ID NO: 124913 - protein, 10 aa, synthetic construct
TDDRGDRGQI

SEQ ID NO: 124914 - protein, 10 aa, synthetic construct
TDERGDRGQI

SEQ ID NO: 124915 - protein, 10 aa, synthetic construct
TEGRGDRGQI

SEQ ID NO: 124916 - protein, 10 aa, synthetic construct
TEARGDRGQI

SEQ ID NO: 124917 - protein, 10 aa, synthetic construct
TEVRGDRGQI

SEQ ID NO: 124918 - protein, 10 aa, synthetic construct
TEPRGDRGQI

SEQ ID NO: 124919 - protein, 10 aa, synthetic construct
TELRGDRGQI

SEQ ID NO: 124920 - protein, 10 aa, synthetic construct
TEIRGDRGQI

SEQ ID NO: 124921 - protein, 10 aa, synthetic construct
TEMRGDRGQI

SEQ ID NO: 124922 - protein, 10 aa, synthetic construct
TEWRGDRGQI

SEQ ID NO: 124923 - protein, 10 aa, synthetic construct
TEFRGDRGQI

SEQ ID NO: 124924 - protein, 10 aa, synthetic construct
TEKRGDRGQI

SEQ ID NO: 124925 - protein, 10 aa, synthetic construct
TERRGDRGQI

SEQ ID NO: 124926 - protein, 10 aa, synthetic construct
TEHRGDRGQI

SEQ ID NO: 124927 - protein, 10 aa, synthetic construct
TESRGDRGQI

SEQ ID NO: 124928 - protein, 10 aa, synthetic construct
TETRGDRGQI

SEQ ID NO: 124929 - protein, 10 aa, synthetic construct
TEYRGDRGQI

SEQ ID NO: 124930 - protein, 10 aa, synthetic construct
TENRGDRGQI

SEQ ID NO: 124931 - protein, 10 aa, synthetic construct
TEQRGDRGQI

SEQ ID NO: 124932 - protein, 10 aa, synthetic construct
TEDRGDRGQI

SEQ ID NO: 124933 - protein, 10 aa, synthetic construct
TEERGDRGQI

SEQ ID NO: 124934 - protein, 10 aa, synthetic construct
AGGRGDRGQI

SEQ ID NO: 124935 - protein, 10 aa, synthetic construct
AGARGDRGQI

SEQ ID NO: 124936 - protein, 10 aa, synthetic construct
AGVRGDRGQI

SEQ ID NO: 124937 - protein, 10 aa, synthetic construct
AGPRGDRGQI

SEQ ID NO: 124938 - protein, 10 aa, synthetic construct
AGLRGDRGQI

SEQ ID NO: 124939 - protein, 10 aa, synthetic construct
AGIRGDRGQI

SEQ ID NO: 124940 - protein, 10 aa, synthetic construct
AGMRGDRGQI

SEQ ID NO: 124941 - protein, 10 aa, synthetic construct
AGWRGDRGQI

SEQ ID NO: 124942 - protein, 10 aa, synthetic construct
AGFRGDRGQI

SEQ ID NO: 124943 - protein, 10 aa, synthetic construct
AGKRGDRGQI

SEQ ID NO: 124944 - protein, 10 aa, synthetic construct
AGRRGDRGQI

SEQ ID NO: 124945 - protein, 10 aa, synthetic construct
AGHRGDRGQI

SEQ ID NO: 124946 - protein, 10 aa, synthetic construct
AGSRGDRGQI

SEQ ID NO: 124947 - protein, 10 aa, synthetic construct
AGTRGDRGQI

SEQ ID NO: 124948 - protein, 10 aa, synthetic construct
AGYRGDRGQI

SEQ ID NO: 124949 - protein, 10 aa, synthetic construct
AGNRGDRGQI

SEQ ID NO: 124950 - protein, 10 aa, synthetic construct
AGQRGDRGQI

SEQ ID NO: 124951 - protein, 10 aa, synthetic construct
AGDRGDRGQI

SEQ ID NO: 124952 - protein, 10 aa, synthetic construct
AGERGDRGQI

SEQ ID NO: 124953 - protein, 10 aa, synthetic construct
AAGRGDRGQI

SEQ ID NO: 124954 - protein, 10 aa, synthetic construct
AAARGDRGQI

SEQ ID NO: 124955 - protein, 10 aa, synthetic construct
AAVRGDRGQI

SEQ ID NO: 124956 - protein, 10 aa, synthetic construct
AAPRGDRGQI

SEQ ID NO: 124957 - protein, 10 aa, synthetic construct
AALRGDRGQI

SEQ ID NO: 124958 - protein, 10 aa, synthetic construct
AAIRGDRGQI

SEQ ID NO: 124959 - protein, 10 aa, synthetic construct
AAMRGDRGQI

SEQ ID NO: 124960 - protein, 10 aa, synthetic construct
AAWRGDRGQI

SEQ ID NO: 124961 - protein, 10 aa, synthetic construct
AAFRGDRGQI

SEQ ID NO: 124962 - protein, 10 aa, synthetic construct
AAKRGDRGQI

SEQ ID NO: 124963 - protein, 10 aa, synthetic construct
AARRGDRGQI

SEQ ID NO: 124964 - protein, 10 aa, synthetic construct
AAHRGDRGQI

SEQ ID NO: 124965 - protein, 10 aa, synthetic construct
AASRGDRGQI

SEQ ID NO: 124966 - protein, 10 aa, synthetic construct
AATRGDRGQI

SEQ ID NO: 124967 - protein, 10 aa, synthetic construct
AAYRGDRGQI

SEQ ID NO: 124968 - protein, 10 aa, synthetic construct
AANRGDRGQI

SEQ ID NO: 124969 - protein, 10 aa, synthetic construct
AAQRGDRGQI

SEQ ID NO: 124970 - protein, 10 aa, synthetic construct
AADRGDRGQI

SEQ ID NO: 124971 - protein, 10 aa, synthetic construct
AAERGDRGQI

SEQ ID NO: 124972 - protein, 10 aa, synthetic construct
AVGRGDRGQI

SEQ ID NO: 124973 - protein, 10 aa, synthetic construct
AVARGDRGQI

SEQ ID NO: 124974 - protein, 10 aa, synthetic construct
AVVRGDRGQI

SEQ ID NO: 124975 - protein, 10 aa, synthetic construct
AVPRGDRGQI

SEQ ID NO: 124976 - protein, 10 aa, synthetic construct
AVLRGDRGQI

SEQ ID NO: 124977 - protein, 10 aa, synthetic construct
AVIRGDRGQI

SEQ ID NO: 124978 - protein, 10 aa, synthetic construct
AVMRGDRGQI

SEQ ID NO: 124979 - protein, 10 aa, synthetic construct
AVWRGDRGQI

SEQ ID NO: 124980 - protein, 10 aa, synthetic construct
AVFRGDRGQI

SEQ ID NO: 124981 - protein, 10 aa, synthetic construct
AVKRGDRGQI

SEQ ID NO: 124982 - protein, 10 aa, synthetic construct
AVRRGDRGQI

SEQ ID NO: 124983 - protein, 10 aa, synthetic construct
AVHRGDRGQI

SEQ ID NO: 124984 - protein, 10 aa, synthetic construct
AVSRGDRGQI

SEQ ID NO: 124985 - protein, 10 aa, synthetic construct
AVTRGDRGQI

SEQ ID NO: 124986 - protein, 10 aa, synthetic construct
AVYRGDRGQI

SEQ ID NO: 124987 - protein, 10 aa, synthetic construct
AVNRGDRGQI

SEQ ID NO: 124988 - protein, 10 aa, synthetic construct
AVQRGDRGQI

SEQ ID NO: 124989 - protein, 10 aa, synthetic construct
AVDRGDRGQI

SEQ ID NO: 124990 - protein, 10 aa, synthetic construct
AVERGDRGQI

SEQ ID NO: 124991 - protein, 10 aa, synthetic construct
APGRGDRGQI

SEQ ID NO: 124992 - protein, 10 aa, synthetic construct
APARGDRGQI

SEQ ID NO: 124993 - protein, 10 aa, synthetic construct
APVRGDRGQI

SEQ ID NO: 124994 - protein, 10 aa, synthetic construct
APPRGDRGQI

SEQ ID NO: 124995 - protein, 10 aa, synthetic construct
APLRGDRGQI

SEQ ID NO: 124996 - protein, 10 aa, synthetic construct
APIRGDRGQI

SEQ ID NO: 124997 - protein, 10 aa, synthetic construct
APMRGDRGQI

SEQ ID NO: 124998 - protein, 10 aa, synthetic construct
APWRGDRGQI

SEQ ID NO: 124999 - protein, 10 aa, synthetic construct
APFRGDRGQI

SEQ ID NO: 125000 - protein, 10 aa, synthetic construct
APKRGDRGQI

SEQ ID NO: 125001 - protein, 10 aa, synthetic construct
APRRGDRGQI

SEQ ID NO: 125002 - protein, 10 aa, synthetic construct
APHRGDRGQI

SEQ ID NO: 125003 - protein, 10 aa, synthetic construct
APSRGDRGQI

SEQ ID NO: 125004 - protein, 10 aa, synthetic construct
APTRGDRGQI

SEQ ID NO: 125005 - protein, 10 aa, synthetic construct
APYRGDRGQI

SEQ ID NO: 125006 - protein, 10 aa, synthetic construct
APNRGDRGQI

SEQ ID NO: 125007 - protein, 10 aa, synthetic construct
APQRGDRGQI

SEQ ID NO: 125008 - protein, 10 aa, synthetic construct
APDRGDRGQI

SEQ ID NO: 125009 - protein, 10 aa, synthetic construct
APERGDRGQI

SEQ ID NO: 125010 - protein, 10 aa, synthetic construct
ALGRGDRGQI

SEQ ID NO: 125011 - protein, 10 aa, synthetic construct
ALARGDRGQI

SEQ ID NO: 125012 - protein, 10 aa, synthetic construct
ALVRGDRGQI

SEQ ID NO: 125013 - protein, 10 aa, synthetic construct
ALPRGDRGQI

SEQ ID NO: 125014 - protein, 10 aa, synthetic construct
ALLRGDRGQI

SEQ ID NO: 125015 - protein, 10 aa, synthetic construct
ALIRGDRGQI

SEQ ID NO: 125016 - protein, 10 aa, synthetic construct
ALMRGDRGQI

SEQ ID NO: 125017 - protein, 10 aa, synthetic construct
ALWRGDRGQI

SEQ ID NO: 125018 - protein, 10 aa, synthetic construct
ALFRGDRGQI

SEQ ID NO: 125019 - protein, 10 aa, synthetic construct
ALKRGDRGQI

SEQ ID NO: 125020 - protein, 10 aa, synthetic construct
ALRRGDRGQI

SEQ ID NO: 125021 - protein, 10 aa, synthetic construct
ALHRGDRGQI

SEQ ID NO: 125022 - protein, 10 aa, synthetic construct
ALSRGDRGQI

SEQ ID NO: 125023 - protein, 10 aa, synthetic construct
ALTRGDRGQI

SEQ ID NO: 125024 - protein, 10 aa, synthetic construct
ALYRGDRGQI

SEQ ID NO: 125025 - protein, 10 aa, synthetic construct
ALNRGDRGQI

SEQ ID NO: 125026 - protein, 10 aa, synthetic construct
ALQRGDRGQI

SEQ ID NO: 125027 - protein, 10 aa, synthetic construct
ALDRGDRGQI

SEQ ID NO: 125028 - protein, 10 aa, synthetic construct
ALERGDRGQI

SEQ ID NO: 125029 - protein, 10 aa, synthetic construct
AIGRGDRGQI

SEQ ID NO: 125030 - protein, 10 aa, synthetic construct
AIARGDRGQI

SEQ ID NO: 125031 - protein, 10 aa, synthetic construct
AIVRGDRGQI

SEQ ID NO: 125032 - protein, 10 aa, synthetic construct
AIPRGDRGQI

SEQ ID NO: 125033 - protein, 10 aa, synthetic construct
AILRGDRGQI

SEQ ID NO: 125034 - protein, 10 aa, synthetic construct
AIIRGDRGQI

SEQ ID NO: 125035 - protein, 10 aa, synthetic construct
AIMRGDRGQI

SEQ ID NO: 125036 - protein, 10 aa, synthetic construct
AIWRGDRGQI

SEQ ID NO: 125037 - protein, 10 aa, synthetic construct
AIFRGDRGQI

SEQ ID NO: 125038 - protein, 10 aa, synthetic construct
AIKRGDRGQI

SEQ ID NO: 125039 - protein, 10 aa, synthetic construct
AIRRGDRGQI

SEQ ID NO: 125040 - protein, 10 aa, synthetic construct
AIHRGDRGQI

SEQ ID NO: 125041 - protein, 10 aa, synthetic construct
AISRGDRGQI

SEQ ID NO: 125042 - protein, 10 aa, synthetic construct
AITRGDRGQI

SEQ ID NO: 125043 - protein, 10 aa, synthetic construct
AIYRGDRGQI

SEQ ID NO: 125044 - protein, 10 aa, synthetic construct
AINRGDRGQI

SEQ ID NO: 125045 - protein, 10 aa, synthetic construct
AIQRGDRGQI

SEQ ID NO: 125046 - protein, 10 aa, synthetic construct
AIDRGDRGQI

SEQ ID NO: 125047 - protein, 10 aa, synthetic construct
AIERGDRGQI

SEQ ID NO: 125048 - protein, 10 aa, synthetic construct
AMGRGDRGQI

SEQ ID NO: 125049 - protein, 10 aa, synthetic construct
AMARGDRGQI

SEQ ID NO: 125050 - protein, 10 aa, synthetic construct
AMVRGDRGQI

SEQ ID NO: 125051 - protein, 10 aa, synthetic construct
AMPRGDRGQI

SEQ ID NO: 125052 - protein, 10 aa, synthetic construct
AMLRGDRGQI

SEQ ID NO: 125053 - protein, 10 aa, synthetic construct
AMIRGDRGQI

SEQ ID NO: 125054 - protein, 10 aa, synthetic construct
AMMRGDRGQI

SEQ ID NO: 125055 - protein, 10 aa, synthetic construct
AMWRGDRGQI

SEQ ID NO: 125056 - protein, 10 aa, synthetic construct
AMFRGDRGQI

SEQ ID NO: 125057 - protein, 10 aa, synthetic construct
AMKRGDRGQI

SEQ ID NO: 125058 - protein, 10 aa, synthetic construct
AMRRGDRGQI

SEQ ID NO: 125059 - protein, 10 aa, synthetic construct
AMHRGDRGQI

SEQ ID NO: 125060 - protein, 10 aa, synthetic construct
AMSRGDRGQI

SEQ ID NO: 125061 - protein, 10 aa, synthetic construct
AMTRGDRGQI

SEQ ID NO: 125062 - protein, 10 aa, synthetic construct
AMYRGDRGQI

SEQ ID NO: 125063 - protein, 10 aa, synthetic construct
AMNRGDRGQI

SEQ ID NO: 125064 - protein, 10 aa, synthetic construct
AMQRGDRGQI

SEQ ID NO: 125065 - protein, 10 aa, synthetic construct
AMDRGDRGQI

SEQ ID NO: 125066 - protein, 10 aa, synthetic construct
AMERGDRGQI

SEQ ID NO: 125067 - protein, 10 aa, synthetic construct
AWGRGDRGQI

SEQ ID NO: 125068 - protein, 10 aa, synthetic construct
AWARGDRGQI

SEQ ID NO: 125069 - protein, 10 aa, synthetic construct
AWVRGDRGQI

SEQ ID NO: 125070 - protein, 10 aa, synthetic construct
AWPRGDRGQI

SEQ ID NO: 125071 - protein, 10 aa, synthetic construct
AWLRGDRGQI

SEQ ID NO: 125072 - protein, 10 aa, synthetic construct
AWIRGDRGQI

SEQ ID NO: 125073 - protein, 10 aa, synthetic construct
AWMRGDRGQI

SEQ ID NO: 125074 - protein, 10 aa, synthetic construct
AWWRGDRGQI

SEQ ID NO: 125075 - protein, 10 aa, synthetic construct
AWFRGDRGQI

SEQ ID NO: 125076 - protein, 10 aa, synthetic construct
AWKRGDRGQI

SEQ ID NO: 125077 - protein, 10 aa, synthetic construct
AWRRGDRGQI

SEQ ID NO: 125078 - protein, 10 aa, synthetic construct
AWHRGDRGQI

SEQ ID NO: 125079 - protein, 10 aa, synthetic construct
AWSRGDRGQI

SEQ ID NO: 125080 - protein, 10 aa, synthetic construct
AWTRGDRGQI

SEQ ID NO: 125081 - protein, 10 aa, synthetic construct
AWYRGDRGQI

SEQ ID NO: 125082 - protein, 10 aa, synthetic construct
AWNRGDRGQI

SEQ ID NO: 125083 - protein, 10 aa, synthetic construct
AWQRGDRGQI

SEQ ID NO: 125084 - protein, 10 aa, synthetic construct
AWDRGDRGQI

SEQ ID NO: 125085 - protein, 10 aa, synthetic construct
AWERGDRGQI

SEQ ID NO: 125086 - protein, 10 aa, synthetic construct
AFGRGDRGQI

SEQ ID NO: 125087 - protein, 10 aa, synthetic construct
AFARGDRGQI

SEQ ID NO: 125088 - protein, 10 aa, synthetic construct
AFVRGDRGQI

SEQ ID NO: 125089 - protein, 10 aa, synthetic construct
AFPRGDRGQI

SEQ ID NO: 125090 - protein, 10 aa, synthetic construct
AFLRGDRGQI

SEQ ID NO: 125091 - protein, 10 aa, synthetic construct
AFIRGDRGQI

SEQ ID NO: 125092 - protein, 10 aa, synthetic construct
AFMRGDRGQI

SEQ ID NO: 125093 - protein, 10 aa, synthetic construct
AFWRGDRGQI

SEQ ID NO: 125094 - protein, 10 aa, synthetic construct
AFFRGDRGQI

SEQ ID NO: 125095 - protein, 10 aa, synthetic construct
AFKRGDRGQI

SEQ ID NO: 125096 - protein, 10 aa, synthetic construct
AFRRGDRGQI

SEQ ID NO: 125097 - protein, 10 aa, synthetic construct
AFHRGDRGQI

SEQ ID NO: 125098 - protein, 10 aa, synthetic construct
AFSRGDRGQI

SEQ ID NO: 125099 - protein, 10 aa, synthetic construct
AFTRGDRGQI

SEQ ID NO: 125100 - protein, 10 aa, synthetic construct
AFYRGDRGQI

SEQ ID NO: 125101 - protein, 10 aa, synthetic construct
AFNRGDRGQI

SEQ ID NO: 125102 - protein, 10 aa, synthetic construct
AFQRGDRGQI

SEQ ID NO: 125103 - protein, 10 aa, synthetic construct
AFDRGDRGQI

SEQ ID NO: 125104 - protein, 10 aa, synthetic construct
AFERGDRGQI

SEQ ID NO: 125105 - protein, 10 aa, synthetic construct
AKGRGDRGQI

SEQ ID NO: 125106 - protein, 10 aa, synthetic construct
AKARGDRGQI

SEQ ID NO: 125107 - protein, 10 aa, synthetic construct
AKVRGDRGQI

SEQ ID NO: 125108 - protein, 10 aa, synthetic construct
AKPRGDRGQI

SEQ ID NO: 125109 - protein, 10 aa, synthetic construct
AKLRGDRGQI

SEQ ID NO: 125110 - protein, 10 aa, synthetic construct
AKIRGDRGQI

SEQ ID NO: 125111 - protein, 10 aa, synthetic construct
AKMRGDRGQI

SEQ ID NO: 125112 - protein, 10 aa, synthetic construct
AKWRGDRGQI

SEQ ID NO: 125113 - protein, 10 aa, synthetic construct
AKFRGDRGQI

SEQ ID NO: 125114 - protein, 10 aa, synthetic construct
AKKRGDRGQI

SEQ ID NO: 125115 - protein, 10 aa, synthetic construct
AKRRGDRGQI

SEQ ID NO: 125116 - protein, 10 aa, synthetic construct
AKHRGDRGQI

SEQ ID NO: 125117 - protein, 10 aa, synthetic construct
AKSRGDRGQI

SEQ ID NO: 125118 - protein, 10 aa, synthetic construct
AKTRGDRGQI

SEQ ID NO: 125119 - protein, 10 aa, synthetic construct
AKYRGDRGQI

SEQ ID NO: 125120 - protein, 10 aa, synthetic construct
AKNRGDRGQI

SEQ ID NO: 125121 - protein, 10 aa, synthetic construct
AKQRGDRGQI

SEQ ID NO: 125122 - protein, 10 aa, synthetic construct
AKDRGDRGQI

SEQ ID NO: 125123 - protein, 10 aa, synthetic construct
AKERGDRGQI

SEQ ID NO: 125124 - protein, 10 aa, synthetic construct
ARGRGDRGQI

SEQ ID NO: 125125 - protein, 10 aa, synthetic construct
ARARGDRGQI

SEQ ID NO: 125126 - protein, 10 aa, synthetic construct
ARVRGDRGQI

SEQ ID NO: 125127 - protein, 10 aa, synthetic construct
ARPRGDRGQI

SEQ ID NO: 125128 - protein, 10 aa, synthetic construct
ARLRGDRGQI

SEQ ID NO: 125129 - protein, 10 aa, synthetic construct
ARIRGDRGQI

SEQ ID NO: 125130 - protein, 10 aa, synthetic construct
ARMRGDRGQI

SEQ ID NO: 125131 - protein, 10 aa, synthetic construct
ARWRGDRGQI

SEQ ID NO: 125132 - protein, 10 aa, synthetic construct
ARFRGDRGQI

SEQ ID NO: 125133 - protein, 10 aa, synthetic construct
ARKRGDRGQI

SEQ ID NO: 125134 - protein, 10 aa, synthetic construct
ARRRGDRGQI

SEQ ID NO: 125135 - protein, 10 aa, synthetic construct
ARHRGDRGQI

SEQ ID NO: 125136 - protein, 10 aa, synthetic construct
ARSRGDRGQI

SEQ ID NO: 125137 - protein, 10 aa, synthetic construct
ARTRGDRGQI

SEQ ID NO: 125138 - protein, 10 aa, synthetic construct
ARYRGDRGQI

SEQ ID NO: 125139 - protein, 10 aa, synthetic construct
ARNRGDRGQI

SEQ ID NO: 125140 - protein, 10 aa, synthetic construct
ARQRGDRGQI

SEQ ID NO: 125141 - protein, 10 aa, synthetic construct
ARDRGDRGQI

SEQ ID NO: 125142 - protein, 10 aa, synthetic construct
ARERGDRGQI

SEQ ID NO: 125143 - protein, 10 aa, synthetic construct
AHGRGDRGQI

SEQ ID NO: 125144 - protein, 10 aa, synthetic construct
AHARGDRGQI

SEQ ID NO: 125145 - protein, 10 aa, synthetic construct
AHVRGDRGQI

SEQ ID NO: 125146 - protein, 10 aa, synthetic construct
AHPRGDRGQI

SEQ ID NO: 125147 - protein, 10 aa, synthetic construct
AHLRGDRGQI

SEQ ID NO: 125148 - protein, 10 aa, synthetic construct
AHIRGDRGQI

SEQ ID NO: 125149 - protein, 10 aa, synthetic construct
AHMRGDRGQI

SEQ ID NO: 125150 - protein, 10 aa, synthetic construct
AHWRGDRGQI

SEQ ID NO: 125151 - protein, 10 aa, synthetic construct
AHFRGDRGQI

SEQ ID NO: 125152 - protein, 10 aa, synthetic construct
AHKRGDRGQI

SEQ ID NO: 125153 - protein, 10 aa, synthetic construct
AHRRGDRGQI

SEQ ID NO: 125154 - protein, 10 aa, synthetic construct
AHHRGDRGQI

SEQ ID NO: 125155 - protein, 10 aa, synthetic construct
AHSRGDRGQI

SEQ ID NO: 125156 - protein, 10 aa, synthetic construct
AHTRGDRGQI

SEQ ID NO: 125157 - protein, 10 aa, synthetic construct
AHYRGDRGQI

SEQ ID NO: 125158 - protein, 10 aa, synthetic construct
AHNRGDRGQI

SEQ ID NO: 125159 - protein, 10 aa, synthetic construct
AHQRGDRGQI

SEQ ID NO: 125160 - protein, 10 aa, synthetic construct
AHDRGDRGQI

SEQ ID NO: 125161 - protein, 10 aa, synthetic construct
AHERGDRGQI

SEQ ID NO: 125162 - protein, 10 aa, synthetic construct
ASGRGDRGQI

SEQ ID NO: 125163 - protein, 10 aa, synthetic construct
ASARGDRGQI

SEQ ID NO: 125164 - protein, 10 aa, synthetic construct
ASVRGDRGQI

SEQ ID NO: 125165 - protein, 10 aa, synthetic construct
ASPRGDRGQI

SEQ ID NO: 125166 - protein, 10 aa, synthetic construct
ASLRGDRGQI

SEQ ID NO: 125167 - protein, 10 aa, synthetic construct
ASIRGDRGQI

SEQ ID NO: 125168 - protein, 10 aa, synthetic construct
ASMRGDRGQI

SEQ ID NO: 125169 - protein, 10 aa, synthetic construct
ASWRGDRGQI

SEQ ID NO: 125170 - protein, 10 aa, synthetic construct
ASFRGDRGQI

SEQ ID NO: 125171 - protein, 10 aa, synthetic construct
ASKRGDRGQI

SEQ ID NO: 125172 - protein, 10 aa, synthetic construct
ASRRGDRGQI

SEQ ID NO: 125173 - protein, 10 aa, synthetic construct
ASHRGDRGQI

SEQ ID NO: 125174 - protein, 10 aa, synthetic construct
ASSRGDRGQI

SEQ ID NO: 125175 - protein, 10 aa, synthetic construct
ASTRGDRGQI

SEQ ID NO: 125176 - protein, 10 aa, synthetic construct
ASYRGDRGQI

SEQ ID NO: 125177 - protein, 10 aa, synthetic construct
ASNRGDRGQI

SEQ ID NO: 125178 - protein, 10 aa, synthetic construct
ASQRGDRGQI

SEQ ID NO: 125179 - protein, 10 aa, synthetic construct
ASDRGDRGQI

SEQ ID NO: 125180 - protein, 10 aa, synthetic construct
ASERGDRGQI

SEQ ID NO: 125181 - protein, 10 aa, synthetic construct
ATGRGDRGQI

SEQ ID NO: 125182 - protein, 10 aa, synthetic construct
ATARGDRGQI

SEQ ID NO: 125183 - protein, 10 aa, synthetic construct
ATVRGDRGQI

SEQ ID NO: 125184 - protein, 10 aa, synthetic construct
ATPRGDRGQI

SEQ ID NO: 125185 - protein, 10 aa, synthetic construct
ATLRGDRGQI

SEQ ID NO: 125186 - protein, 10 aa, synthetic construct
ATIRGDRGQI

SEQ ID NO: 125187 - protein, 10 aa, synthetic construct
ATMRGDRGQI

SEQ ID NO: 125188 - protein, 10 aa, synthetic construct
ATWRGDRGQI

SEQ ID NO: 125189 - protein, 10 aa, synthetic construct
ATFRGDRGQI

SEQ ID NO: 125190 - protein, 10 aa, synthetic construct
ATKRGDRGQI

SEQ ID NO: 125191 - protein, 10 aa, synthetic construct
ATRRGDRGQI

SEQ ID NO: 125192 - protein, 10 aa, synthetic construct
ATHRGDRGQI

SEQ ID NO: 125193 - protein, 10 aa, synthetic construct
ATSRGDRGQI

SEQ ID NO: 125194 - protein, 10 aa, synthetic construct
ATTRGDRGQI

SEQ ID NO: 125195 - protein, 10 aa, synthetic construct
ATYRGDRGQI

SEQ ID NO: 125196 - protein, 10 aa, synthetic construct
ATNRGDRGQI

SEQ ID NO: 125197 - protein, 10 aa, synthetic construct
ATQRGDRGQI

SEQ ID NO: 125198 - protein, 10 aa, synthetic construct
ATDRGDRGQI

SEQ ID NO: 125199 - protein, 10 aa, synthetic construct
ATERGDRGQI

SEQ ID NO: 125200 - protein, 10 aa, synthetic construct
AYGRGDRGQI

SEQ ID NO: 125201 - protein, 10 aa, synthetic construct
AYARGDRGQI

SEQ ID NO: 125202 - protein, 10 aa, synthetic construct
AYVRGDRGQI

SEQ ID NO: 125203 - protein, 10 aa, synthetic construct
AYPRGDRGQI

SEQ ID NO: 125204 - protein, 10 aa, synthetic construct
AYLRGDRGQI

SEQ ID NO: 125205 - protein, 10 aa, synthetic construct
AYIRGDRGQI

SEQ ID NO: 125206 - protein, 10 aa, synthetic construct
AYMRGDRGQI

SEQ ID NO: 125207 - protein, 10 aa, synthetic construct
AYWRGDRGQI

SEQ ID NO: 125208 - protein, 10 aa, synthetic construct
AYFRGDRGQI

SEQ ID NO: 125209 - protein, 10 aa, synthetic construct
AYKRGDRGQI

SEQ ID NO: 125210 - protein, 10 aa, synthetic construct
AYRRGDRGQI

SEQ ID NO: 125211 - protein, 10 aa, synthetic construct
AYHRGDRGQI

SEQ ID NO: 125212 - protein, 10 aa, synthetic construct
AYSRGDRGQI

SEQ ID NO: 125213 - protein, 10 aa, synthetic construct
AYTRGDRGQI

SEQ ID NO: 125214 - protein, 10 aa, synthetic construct
AYYRGDRGQI

SEQ ID NO: 125215 - protein, 10 aa, synthetic construct
AYNRGDRGQI

SEQ ID NO: 125216 - protein, 10 aa, synthetic construct
AYQRGDRGQI

SEQ ID NO: 125217 - protein, 10 aa, synthetic construct
AYDRGDRGQI

SEQ ID NO: 125218 - protein, 10 aa, synthetic construct
AYERGDRGQI

SEQ ID NO: 125219 - protein, 10 aa, synthetic construct
ANGRGDRGQI

SEQ ID NO: 125220 - protein, 10 aa, synthetic construct
ANARGDRGQI

SEQ ID NO: 125221 - protein, 10 aa, synthetic construct
ANVRGDRGQI

SEQ ID NO: 125222 - protein, 10 aa, synthetic construct
ANPRGDRGQI

SEQ ID NO: 125223 - protein, 10 aa, synthetic construct
ANLRGDRGQI

SEQ ID NO: 125224 - protein, 10 aa, synthetic construct
ANIRGDRGQI

SEQ ID NO: 125225 - protein, 10 aa, synthetic construct
ANMRGDRGQI

SEQ ID NO: 125226 - protein, 10 aa, synthetic construct
ANWRGDRGQI

SEQ ID NO: 125227 - protein, 10 aa, synthetic construct
ANFRGDRGQI

SEQ ID NO: 125228 - protein, 10 aa, synthetic construct
ANKRGDRGQI

SEQ ID NO: 125229 - protein, 10 aa, synthetic construct
ANRRGDRGQI

SEQ ID NO: 125230 - protein, 10 aa, synthetic construct
ANHRGDRGQI

SEQ ID NO: 125231 - protein, 10 aa, synthetic construct
ANSRGDRGQI

SEQ ID NO: 125232 - protein, 10 aa, synthetic construct
ANTRGDRGQI

SEQ ID NO: 125233 - protein, 10 aa, synthetic construct
ANYRGDRGQI

SEQ ID NO: 125234 - protein, 10 aa, synthetic construct
ANNRGDRGQI

SEQ ID NO: 125235 - protein, 10 aa, synthetic construct
ANQRGDRGQI

SEQ ID NO: 125236 - protein, 10 aa, synthetic construct
ANDRGDRGQI

SEQ ID NO: 125237 - protein, 10 aa, synthetic construct
ANERGDRGQI

SEQ ID NO: 125238 - protein, 10 aa, synthetic construct
AQGRGDRGQI

SEQ ID NO: 125239 - protein, 10 aa, synthetic construct
AQARGDRGQI

SEQ ID NO: 125240 - protein, 10 aa, synthetic construct
AQVRGDRGQI

SEQ ID NO: 125241 - protein, 10 aa, synthetic construct
AQPRGDRGQI

SEQ ID NO: 125242 - protein, 10 aa, synthetic construct
AQLRGDRGQI

SEQ ID NO: 125243 - protein, 10 aa, synthetic construct
AQIRGDRGQI

SEQ ID NO: 125244 - protein, 10 aa, synthetic construct
AQMRGDRGQI

SEQ ID NO: 125245 - protein, 10 aa, synthetic construct
AQWRGDRGQI

SEQ ID NO: 125246 - protein, 10 aa, synthetic construct
AQFRGDRGQI

SEQ ID NO: 125247 - protein, 10 aa, synthetic construct
AQKRGDRGQI

SEQ ID NO: 125248 - protein, 10 aa, synthetic construct
AQRRGDRGQI

SEQ ID NO: 125249 - protein, 10 aa, synthetic construct
AQHRGDRGQI

SEQ ID NO: 125250 - protein, 10 aa, synthetic construct
AQSRGDRGQI

SEQ ID NO: 125251 - protein, 10 aa, synthetic construct
AQTRGDRGQI

SEQ ID NO: 125252 - protein, 10 aa, synthetic construct
AQYRGDRGQI

SEQ ID NO: 125253 - protein, 10 aa, synthetic construct
AQNRGDRGQI

SEQ ID NO: 125254 - protein, 10 aa, synthetic construct
AQQRGDRGQI

SEQ ID NO: 125255 - protein, 10 aa, synthetic construct
AQDRGDRGQI

SEQ ID NO: 125256 - protein, 10 aa, synthetic construct
AQERGDRGQI

SEQ ID NO: 125257 - protein, 10 aa, synthetic construct
ADGRGDRGQI

SEQ ID NO: 125258 - protein, 10 aa, synthetic construct
ADARGDRGQI

SEQ ID NO: 125259 - protein, 10 aa, synthetic construct
ADVRGDRGQI

SEQ ID NO: 125260 - protein, 10 aa, synthetic construct
ADPRGDRGQI

SEQ ID NO: 125261 - protein, 10 aa, synthetic construct
ADLRGDRGQI

SEQ ID NO: 125262 - protein, 10 aa, synthetic construct
ADIRGDRGQI

SEQ ID NO: 125263 - protein, 10 aa, synthetic construct
ADMRGDRGQI

SEQ ID NO: 125264 - protein, 10 aa, synthetic construct
ADWRGDRGQI

SEQ ID NO: 125265 - protein, 10 aa, synthetic construct
ADFRGDRGQI

SEQ ID NO: 125266 - protein, 10 aa, synthetic construct
ADKRGDRGQI

SEQ ID NO: 125267 - protein, 10 aa, synthetic construct
ADRRGDRGQI

SEQ ID NO: 125268 - protein, 10 aa, synthetic construct
ADHRGDRGQI

SEQ ID NO: 125269 - protein, 10 aa, synthetic construct
ADSRGDRGQI

SEQ ID NO: 125270 - protein, 10 aa, synthetic construct
ADTRGDRGQI

SEQ ID NO: 125271 - protein, 10 aa, synthetic construct
ADYRGDRGQI

SEQ ID NO: 125272 - protein, 10 aa, synthetic construct
ADNRGDRGQI

SEQ ID NO: 125273 - protein, 10 aa, synthetic construct
ADQRGDRGQI

SEQ ID NO: 125274 - protein, 10 aa, synthetic construct
ADDRGDRGQI

SEQ ID NO: 125275 - protein, 10 aa, synthetic construct
ADERGDRGQI

SEQ ID NO: 125276 - protein, 10 aa, synthetic construct
AEGRGDRGQI

SEQ ID NO: 125277 - protein, 10 aa, synthetic construct
AEARGDRGQI

SEQ ID NO: 125278 - protein, 10 aa, synthetic construct
AEVRGDRGQI

SEQ ID NO: 125279 - protein, 10 aa, synthetic construct
AEPRGDRGQI

SEQ ID NO: 125280 - protein, 10 aa, synthetic construct
AELRGDRGQI

SEQ ID NO: 125281 - protein, 10 aa, synthetic construct
AEIRGDRGQI

SEQ ID NO: 125282 - protein, 10 aa, synthetic construct
AEMRGDRGQI

SEQ ID NO: 125283 - protein, 10 aa, synthetic construct
AEWRGDRGQI

SEQ ID NO: 125284 - protein, 10 aa, synthetic construct
AEFRGDRGQI

SEQ ID NO: 125285 - protein, 10 aa, synthetic construct
AEKRGDRGQI

SEQ ID NO: 125286 - protein, 10 aa, synthetic construct
AERRGDRGQI

SEQ ID NO: 125287 - protein, 10 aa, synthetic construct
AEHRGDRGQI

SEQ ID NO: 125288 - protein, 10 aa, synthetic construct
AESRGDRGQI

SEQ ID NO: 125289 - protein, 10 aa, synthetic construct
AETRGDRGQI

SEQ ID NO: 125290 - protein, 10 aa, synthetic construct
AEYRGDRGQI

SEQ ID NO: 125291 - protein, 10 aa, synthetic construct
AENRGDRGQI

SEQ ID NO: 125292 - protein, 10 aa, synthetic construct
AEQRGDRGQI

SEQ ID NO: 125293 - protein, 10 aa, synthetic construct
AEDRGDRGQI

SEQ ID NO: 125294 - protein, 10 aa, synthetic construct
AEERGDRGQI

SEQ ID NO: 125295 - protein, 10 aa, synthetic construct
EGGRGDRGQI

SEQ ID NO: 125296 - protein, 10 aa, synthetic construct
EGARGDRGQI

SEQ ID NO: 125297 - protein, 10 aa, synthetic construct
EGVRGDRGQI

SEQ ID NO: 125298 - protein, 10 aa, synthetic construct
EGPRGDRGQI

SEQ ID NO: 125299 - protein, 10 aa, synthetic construct
EGLRGDRGQI

SEQ ID NO: 125300 - protein, 10 aa, synthetic construct
EGIRGDRGQI

SEQ ID NO: 125301 - protein, 10 aa, synthetic construct
EGMRGDRGQI

SEQ ID NO: 125302 - protein, 10 aa, synthetic construct
EGWRGDRGQI

SEQ ID NO: 125303 - protein, 10 aa, synthetic construct
EGFRGDRGQI

SEQ ID NO: 125304 - protein, 10 aa, synthetic construct
EGKRGDRGQI

SEQ ID NO: 125305 - protein, 10 aa, synthetic construct
EGRRGDRGQI

SEQ ID NO: 125306 - protein, 10 aa, synthetic construct
EGHRGDRGQI

SEQ ID NO: 125307 - protein, 10 aa, synthetic construct
EGSRGDRGQI

SEQ ID NO: 125308 - protein, 10 aa, synthetic construct
EGTRGDRGQI

SEQ ID NO: 125309 - protein, 10 aa, synthetic construct
EGYRGDRGQI

SEQ ID NO: 125310 - protein, 10 aa, synthetic construct
EGNRGDRGQI

SEQ ID NO: 125311 - protein, 10 aa, synthetic construct
EGQRGDRGQI

SEQ ID NO: 125312 - protein, 10 aa, synthetic construct
EGDRGDRGQI

SEQ ID NO: 125313 - protein, 10 aa, synthetic construct
EGERGDRGQI

SEQ ID NO: 125314 - protein, 10 aa, synthetic construct
EAGRGDRGQI

SEQ ID NO: 125315 - protein, 10 aa, synthetic construct
EAARGDRGQI

SEQ ID NO: 125316 - protein, 10 aa, synthetic construct
EAVRGDRGQI

SEQ ID NO: 125317 - protein, 10 aa, synthetic construct
EAPRGDRGQI

SEQ ID NO: 125318 - protein, 10 aa, synthetic construct
EALRGDRGQI

SEQ ID NO: 125319 - protein, 10 aa, synthetic construct
EAIRGDRGQI

SEQ ID NO: 125320 - protein, 10 aa, synthetic construct
EAMRGDRGQI

SEQ ID NO: 125321 - protein, 10 aa, synthetic construct
EAWRGDRGQI

SEQ ID NO: 125322 - protein, 10 aa, synthetic construct
EAFRGDRGQI

SEQ ID NO: 125323 - protein, 10 aa, synthetic construct
EAKRGDRGQI

SEQ ID NO: 125324 - protein, 10 aa, synthetic construct
EARRGDRGQI

SEQ ID NO: 125325 - protein, 10 aa, synthetic construct
EAHRGDRGQI

SEQ ID NO: 125326 - protein, 10 aa, synthetic construct
EASRGDRGQI

SEQ ID NO: 125327 - protein, 10 aa, synthetic construct
EATRGDRGQI

SEQ ID NO: 125328 - protein, 10 aa, synthetic construct
EAYRGDRGQI

SEQ ID NO: 125329 - protein, 10 aa, synthetic construct
EANRGDRGQI

SEQ ID NO: 125330 - protein, 10 aa, synthetic construct
EAQRGDRGQI

SEQ ID NO: 125331 - protein, 10 aa, synthetic construct
EADRGDRGQI

SEQ ID NO: 125332 - protein, 10 aa, synthetic construct
EAERGDRGQI

SEQ ID NO: 125333 - protein, 10 aa, synthetic construct
EVGRGDRGQI

SEQ ID NO: 125334 - protein, 10 aa, synthetic construct
EVARGDRGQI

SEQ ID NO: 125335 - protein, 10 aa, synthetic construct
EVVRGDRGQI

SEQ ID NO: 125336 - protein, 10 aa, synthetic construct
EVPRGDRGQI

SEQ ID NO: 125337 - protein, 10 aa, synthetic construct
EVLRGDRGQI

SEQ ID NO: 125338 - protein, 10 aa, synthetic construct
EVIRGDRGQI

SEQ ID NO: 125339 - protein, 10 aa, synthetic construct
EVMRGDRGQI

SEQ ID NO: 125340 - protein, 10 aa, synthetic construct
EVWRGDRGQI

SEQ ID NO: 125341 - protein, 10 aa, synthetic construct
EVFRGDRGQI

SEQ ID NO: 125342 - protein, 10 aa, synthetic construct
EVKRGDRGQI

SEQ ID NO: 125343 - protein, 10 aa, synthetic construct
EVRRGDRGQI

SEQ ID NO: 125344 - protein, 10 aa, synthetic construct
EVHRGDRGQI

SEQ ID NO: 125345 - protein, 10 aa, synthetic construct
EVSRGDRGQI

SEQ ID NO: 125346 - protein, 10 aa, synthetic construct
EVTRGDRGQI

SEQ ID NO: 125347 - protein, 10 aa, synthetic construct
EVYRGDRGQI

SEQ ID NO: 125348 - protein, 10 aa, synthetic construct
EVNRGDRGQI

SEQ ID NO: 125349 - protein, 10 aa, synthetic construct
EVQRGDRGQI

SEQ ID NO: 125350 - protein, 10 aa, synthetic construct
EVDRGDRGQI

SEQ ID NO: 125351 - protein, 10 aa, synthetic construct
EVERGDRGQI

SEQ ID NO: 125352 - protein, 10 aa, synthetic construct
EPGRGDRGQI

SEQ ID NO: 125353 - protein, 10 aa, synthetic construct
EPARGDRGQI

SEQ ID NO: 125354 - protein, 10 aa, synthetic construct
EPVRGDRGQI

SEQ ID NO: 125355 - protein, 10 aa, synthetic construct
EPPRGDRGQI

SEQ ID NO: 125356 - protein, 10 aa, synthetic construct
EPLRGDRGQI

SEQ ID NO: 125357 - protein, 10 aa, synthetic construct
EPIRGDRGQI

SEQ ID NO: 125358 - protein, 10 aa, synthetic construct
EPMRGDRGQI

SEQ ID NO: 125359 - protein, 10 aa, synthetic construct
EPWRGDRGQI

SEQ ID NO: 125360 - protein, 10 aa, synthetic construct
EPFRGDRGQI

SEQ ID NO: 125361 - protein, 10 aa, synthetic construct
EPKRGDRGQI

SEQ ID NO: 125362 - protein, 10 aa, synthetic construct
EPRRGDRGQI

SEQ ID NO: 125363 - protein, 10 aa, synthetic construct
EPHRGDRGQI

SEQ ID NO: 125364 - protein, 10 aa, synthetic construct
EPSRGDRGQI

SEQ ID NO: 125365 - protein, 10 aa, synthetic construct
EPTRGDRGQI

SEQ ID NO: 125366 - protein, 10 aa, synthetic construct
EPYRGDRGQI

SEQ ID NO: 125367 - protein, 10 aa, synthetic construct
EPNRGDRGQI

SEQ ID NO: 125368 - protein, 10 aa, synthetic construct
EPQRGDRGQI

SEQ ID NO: 125369 - protein, 10 aa, synthetic construct
EPDRGDRGQI

SEQ ID NO: 125370 - protein, 10 aa, synthetic construct
EPERGDRGQI

SEQ ID NO: 125371 - protein, 10 aa, synthetic construct
ELGRGDRGQI

SEQ ID NO: 125372 - protein, 10 aa, synthetic construct
ELARGDRGQI

SEQ ID NO: 125373 - protein, 10 aa, synthetic construct
ELVRGDRGQI

SEQ ID NO: 125374 - protein, 10 aa, synthetic construct
ELPRGDRGQI

SEQ ID NO: 125375 - protein, 10 aa, synthetic construct
ELLRGDRGQI

SEQ ID NO: 125376 - protein, 10 aa, synthetic construct
ELIRGDRGQI

SEQ ID NO: 125377 - protein, 10 aa, synthetic construct
ELMRGDRGQI

SEQ ID NO: 125378 - protein, 10 aa, synthetic construct
ELWRGDRGQI

SEQ ID NO: 125379 - protein, 10 aa, synthetic construct
ELFRGDRGQI

SEQ ID NO: 125380 - protein, 10 aa, synthetic construct
ELKRGDRGQI

SEQ ID NO: 125381 - protein, 10 aa, synthetic construct
ELRRGDRGQI

SEQ ID NO: 125382 - protein, 10 aa, synthetic construct
ELHRGDRGQI

SEQ ID NO: 125383 - protein, 10 aa, synthetic construct
ELSRGDRGQI

SEQ ID NO: 125384 - protein, 10 aa, synthetic construct
ELTRGDRGQI

SEQ ID NO: 125385 - protein, 10 aa, synthetic construct
ELYRGDRGQI

SEQ ID NO: 125386 - protein, 10 aa, synthetic construct
ELNRGDRGQI

SEQ ID NO: 125387 - protein, 10 aa, synthetic construct
ELQRGDRGQI

SEQ ID NO: 125388 - protein, 10 aa, synthetic construct
ELDRGDRGQI

SEQ ID NO: 125389 - protein, 10 aa, synthetic construct
ELERGDRGQI

SEQ ID NO: 125390 - protein, 10 aa, synthetic construct
EIGRGDRGQI

SEQ ID NO: 125391 - protein, 10 aa, synthetic construct
EIARGDRGQI

SEQ ID NO: 125392 - protein, 10 aa, synthetic construct
EIVRGDRGQI

SEQ ID NO: 125393 - protein, 10 aa, synthetic construct
EIPRGDRGQI

SEQ ID NO: 125394 - protein, 10 aa, synthetic construct
EILRGDRGQI

SEQ ID NO: 125395 - protein, 10 aa, synthetic construct
EIIRGDRGQI

SEQ ID NO: 125396 - protein, 10 aa, synthetic construct
EIMRGDRGQI

SEQ ID NO: 125397 - protein, 10 aa, synthetic construct
EIWRGDRGQI

SEQ ID NO: 125398 - protein, 10 aa, synthetic construct
EIFRGDRGQI

SEQ ID NO: 125399 - protein, 10 aa, synthetic construct
EIKRGDRGQI

SEQ ID NO: 125400 - protein, 10 aa, synthetic construct
EIRRGDRGQI

SEQ ID NO: 125401 - protein, 10 aa, synthetic construct
EIHRGDRGQI

SEQ ID NO: 125402 - protein, 10 aa, synthetic construct
EISRGDRGQI

SEQ ID NO: 125403 - protein, 10 aa, synthetic construct
EITRGDRGQI

SEQ ID NO: 125404 - protein, 10 aa, synthetic construct
EIYRGDRGQI

SEQ ID NO: 125405 - protein, 10 aa, synthetic construct
EINRGDRGQI

SEQ ID NO: 125406 - protein, 10 aa, synthetic construct
EIQRGDRGQI

SEQ ID NO: 125407 - protein, 10 aa, synthetic construct
EIDRGDRGQI

SEQ ID NO: 125408 - protein, 10 aa, synthetic construct
EIERGDRGQI

SEQ ID NO: 125409 - protein, 10 aa, synthetic construct
EMGRGDRGQI

SEQ ID NO: 125410 - protein, 10 aa, synthetic construct
EMARGDRGQI

SEQ ID NO: 125411 - protein, 10 aa, synthetic construct
EMVRGDRGQI

SEQ ID NO: 125412 - protein, 10 aa, synthetic construct
EMPRGDRGQI

SEQ ID NO: 125413 - protein, 10 aa, synthetic construct
EMLRGDRGQI

SEQ ID NO: 125414 - protein, 10 aa, synthetic construct
EMIRGDRGQI

SEQ ID NO: 125415 - protein, 10 aa, synthetic construct
EMMRGDRGQI

SEQ ID NO: 125416 - protein, 10 aa, synthetic construct
EMWRGDRGQI

SEQ ID NO: 125417 - protein, 10 aa, synthetic construct
EMFRGDRGQI

SEQ ID NO: 125418 - protein, 10 aa, synthetic construct
EMKRGDRGQI

SEQ ID NO: 125419 - protein, 10 aa, synthetic construct
EMRRGDRGQI

SEQ ID NO: 125420 - protein, 10 aa, synthetic construct
EMHRGDRGQI

SEQ ID NO: 125421 - protein, 10 aa, synthetic construct
EMSRGDRGQI

SEQ ID NO: 125422 - protein, 10 aa, synthetic construct
EMTRGDRGQI

SEQ ID NO: 125423 - protein, 10 aa, synthetic construct
EMYRGDRGQI

SEQ ID NO: 125424 - protein, 10 aa, synthetic construct
EMNRGDRGQI

SEQ ID NO: 125425 - protein, 10 aa, synthetic construct
EMQRGDRGQI

SEQ ID NO: 125426 - protein, 10 aa, synthetic construct
EMDRGDRGQI

SEQ ID NO: 125427 - protein, 10 aa, synthetic construct
EMERGDRGQI

SEQ ID NO: 125428 - protein, 10 aa, synthetic construct
EWGRGDRGQI

SEQ ID NO: 125429 - protein, 10 aa, synthetic construct
EWARGDRGQI

SEQ ID NO: 125430 - protein, 10 aa, synthetic construct
EWVRGDRGQI

SEQ ID NO: 125431 - protein, 10 aa, synthetic construct
EWPRGDRGQI

SEQ ID NO: 125432 - protein, 10 aa, synthetic construct
EWLRGDRGQI

SEQ ID NO: 125433 - protein, 10 aa, synthetic construct
EWIRGDRGQI

SEQ ID NO: 125434 - protein, 10 aa, synthetic construct
EWMRGDRGQI

SEQ ID NO: 125435 - protein, 10 aa, synthetic construct
EWWRGDRGQI

SEQ ID NO: 125436 - protein, 10 aa, synthetic construct
EWFRGDRGQI

SEQ ID NO: 125437 - protein, 10 aa, synthetic construct
EWKRGDRGQI

SEQ ID NO: 125438 - protein, 10 aa, synthetic construct
EWRRGDRGQI

SEQ ID NO: 125439 - protein, 10 aa, synthetic construct
EWHRGDRGQI

SEQ ID NO: 125440 - protein, 10 aa, synthetic construct
EWSRGDRGQI

SEQ ID NO: 125441 - protein, 10 aa, synthetic construct
EWTRGDRGQI

SEQ ID NO: 125442 - protein, 10 aa, synthetic construct
EWYRGDRGQI

SEQ ID NO: 125443 - protein, 10 aa, synthetic construct
EWNRGDRGQI

SEQ ID NO: 125444 - protein, 10 aa, synthetic construct
EWQRGDRGQI

SEQ ID NO: 125445 - protein, 10 aa, synthetic construct
EWDRGDRGQI

SEQ ID NO: 125446 - protein, 10 aa, synthetic construct
EWERGDRGQI

SEQ ID NO: 125447 - protein, 10 aa, synthetic construct
EFGRGDRGQI

SEQ ID NO: 125448 - protein, 10 aa, synthetic construct
EFARGDRGQI

SEQ ID NO: 125449 - protein, 10 aa, synthetic construct
EFVRGDRGQI

SEQ ID NO: 125450 - protein, 10 aa, synthetic construct
EFPRGDRGQI

SEQ ID NO: 125451 - protein, 10 aa, synthetic construct
EFLRGDRGQI

SEQ ID NO: 125452 - protein, 10 aa, synthetic construct
EFIRGDRGQI

SEQ ID NO: 125453 - protein, 10 aa, synthetic construct
EFMRGDRGQI

SEQ ID NO: 125454 - protein, 10 aa, synthetic construct
EFWRGDRGQI

SEQ ID NO: 125455 - protein, 10 aa, synthetic construct
EFFRGDRGQI

SEQ ID NO: 125456 - protein, 10 aa, synthetic construct
EFKRGDRGQI

SEQ ID NO: 125457 - protein, 10 aa, synthetic construct
EFRRGDRGQI

SEQ ID NO: 125458 - protein, 10 aa, synthetic construct
EFHRGDRGQI

SEQ ID NO: 125459 - protein, 10 aa, synthetic construct
EFSRGDRGQI

SEQ ID NO: 125460 - protein, 10 aa, synthetic construct
EFTRGDRGQI

SEQ ID NO: 125461 - protein, 10 aa, synthetic construct
EFYRGDRGQI

SEQ ID NO: 125462 - protein, 10 aa, synthetic construct
EFNRGDRGQI

SEQ ID NO: 125463 - protein, 10 aa, synthetic construct
EFQRGDRGQI

SEQ ID NO: 125464 - protein, 10 aa, synthetic construct
EFDRGDRGQI

SEQ ID NO: 125465 - protein, 10 aa, synthetic construct
EFERGDRGQI

SEQ ID NO: 125466 - protein, 10 aa, synthetic construct
EKGRGDRGQI

SEQ ID NO: 125467 - protein, 10 aa, synthetic construct
EKARGDRGQI

SEQ ID NO: 125468 - protein, 10 aa, synthetic construct
EKVRGDRGQI

SEQ ID NO: 125469 - protein, 10 aa, synthetic construct
EKPRGDRGQI

SEQ ID NO: 125470 - protein, 10 aa, synthetic construct
EKLRGDRGQI

SEQ ID NO: 125471 - protein, 10 aa, synthetic construct
EKIRGDRGQI

SEQ ID NO: 125472 - protein, 10 aa, synthetic construct
EKMRGDRGQI

SEQ ID NO: 125473 - protein, 10 aa, synthetic construct
EKWRGDRGQI

SEQ ID NO: 125474 - protein, 10 aa, synthetic construct
EKFRGDRGQI

SEQ ID NO: 125475 - protein, 10 aa, synthetic construct
EKKRGDRGQI

SEQ ID NO: 125476 - protein, 10 aa, synthetic construct
EKRRGDRGQI

SEQ ID NO: 125477 - protein, 10 aa, synthetic construct
EKHRGDRGQI

SEQ ID NO: 125478 - protein, 10 aa, synthetic construct
EKSRGDRGQI

SEQ ID NO: 125479 - protein, 10 aa, synthetic construct
EKTRGDRGQI

SEQ ID NO: 125480 - protein, 10 aa, synthetic construct
EKYRGDRGQI

SEQ ID NO: 125481 - protein, 10 aa, synthetic construct
EKNRGDRGQI

SEQ ID NO: 125482 - protein, 10 aa, synthetic construct
EKQRGDRGQI

SEQ ID NO: 125483 - protein, 10 aa, synthetic construct
EKDRGDRGQI

SEQ ID NO: 125484 - protein, 10 aa, synthetic construct
EKERGDRGQI

SEQ ID NO: 125485 - protein, 10 aa, synthetic construct
ERGRGDRGQI

SEQ ID NO: 125486 - protein, 10 aa, synthetic construct
ERARGDRGQI

SEQ ID NO: 125487 - protein, 10 aa, synthetic construct
ERVRGDRGQI

SEQ ID NO: 125488 - protein, 10 aa, synthetic construct
ERPRGDRGQI

SEQ ID NO: 125489 - protein, 10 aa, synthetic construct
ERLRGDRGQI

SEQ ID NO: 125490 - protein, 10 aa, synthetic construct
ERIRGDRGQI

SEQ ID NO: 125491 - protein, 10 aa, synthetic construct
ERMRGDRGQI

SEQ ID NO: 125492 - protein, 10 aa, synthetic construct
ERWRGDRGQI

SEQ ID NO: 125493 - protein, 10 aa, synthetic construct
ERFRGDRGQI

SEQ ID NO: 125494 - protein, 10 aa, synthetic construct
ERKRGDRGQI

SEQ ID NO: 125495 - protein, 10 aa, synthetic construct
ERRRGDRGQI

SEQ ID NO: 125496 - protein, 10 aa, synthetic construct
ERHRGDRGQI

SEQ ID NO: 125497 - protein, 10 aa, synthetic construct
ERSRGDRGQI

SEQ ID NO: 125498 - protein, 10 aa, synthetic construct
ERTRGDRGQI

SEQ ID NO: 125499 - protein, 10 aa, synthetic construct
ERYRGDRGQI

SEQ ID NO: 125500 - protein, 10 aa, synthetic construct
ERNRGDRGQI

SEQ ID NO: 125501 - protein, 10 aa, synthetic construct
ERQRGDRGQI

SEQ ID NO: 125502 - protein, 10 aa, synthetic construct
ERDRGDRGQI

SEQ ID NO: 125503 - protein, 10 aa, synthetic construct
ERERGDRGQI

SEQ ID NO: 125504 - protein, 10 aa, synthetic construct
EHGRGDRGQI

SEQ ID NO: 125505 - protein, 10 aa, synthetic construct
EHARGDRGQI

SEQ ID NO: 125506 - protein, 10 aa, synthetic construct
EHVRGDRGQI

SEQ ID NO: 125507 - protein, 10 aa, synthetic construct
EHPRGDRGQI

SEQ ID NO: 125508 - protein, 10 aa, synthetic construct
EHLRGDRGQI

SEQ ID NO: 125509 - protein, 10 aa, synthetic construct
EHIRGDRGQI

SEQ ID NO: 125510 - protein, 10 aa, synthetic construct
EHMRGDRGQI

SEQ ID NO: 125511 - protein, 10 aa, synthetic construct
EHWRGDRGQI

SEQ ID NO: 125512 - protein, 10 aa, synthetic construct
EHFRGDRGQI

SEQ ID NO: 125513 - protein, 10 aa, synthetic construct
EHKRGDRGQI

SEQ ID NO: 125514 - protein, 10 aa, synthetic construct
EHRRGDRGQI

SEQ ID NO: 125515 - protein, 10 aa, synthetic construct
EHHRGDRGQI

SEQ ID NO: 125516 - protein, 10 aa, synthetic construct
EHSRGDRGQI

SEQ ID NO: 125517 - protein, 10 aa, synthetic construct
EHTRGDRGQI

SEQ ID NO: 125518 - protein, 10 aa, synthetic construct
EHYRGDRGQI

SEQ ID NO: 125519 - protein, 10 aa, synthetic construct
EHNRGDRGQI

SEQ ID NO: 125520 - protein, 10 aa, synthetic construct
EHQRGDRGQI

SEQ ID NO: 125521 - protein, 10 aa, synthetic construct
EHDRGDRGQI

SEQ ID NO: 125522 - protein, 10 aa, synthetic construct
EHERGDRGQI

SEQ ID NO: 125523 - protein, 10 aa, synthetic construct
ESGRGDRGQI

SEQ ID NO: 125524 - protein, 10 aa, synthetic construct
ESARGDRGQI

SEQ ID NO: 125525 - protein, 10 aa, synthetic construct
ESVRGDRGQI

SEQ ID NO: 125526 - protein, 10 aa, synthetic construct
ESPRGDRGQI

SEQ ID NO: 125527 - protein, 10 aa, synthetic construct
ESLRGDRGQI

SEQ ID NO: 125528 - protein, 10 aa, synthetic construct
ESIRGDRGQI

SEQ ID NO: 125529 - protein, 10 aa, synthetic construct
ESMRGDRGQI

SEQ ID NO: 125530 - protein, 10 aa, synthetic construct
ESWRGDRGQI

SEQ ID NO: 125531 - protein, 10 aa, synthetic construct
ESFRGDRGQI

SEQ ID NO: 125532 - protein, 10 aa, synthetic construct
ESKRGDRGQI

SEQ ID NO: 125533 - protein, 10 aa, synthetic construct
ESRRGDRGQI

SEQ ID NO: 125534 - protein, 10 aa, synthetic construct
ESHRGDRGQI

SEQ ID NO: 125535 - protein, 10 aa, synthetic construct
ESSRGDRGQI

SEQ ID NO: 125536 - protein, 10 aa, synthetic construct
ESTRGDRGQI

SEQ ID NO: 125537 - protein, 10 aa, synthetic construct
ESYRGDRGQI

SEQ ID NO: 125538 - protein, 10 aa, synthetic construct
ESNRGDRGQI

SEQ ID NO: 125539 - protein, 10 aa, synthetic construct
ESQRGDRGQI

SEQ ID NO: 125540 - protein, 10 aa, synthetic construct
ESDRGDRGQI

SEQ ID NO: 125541 - protein, 10 aa, synthetic construct
ESERGDRGQI

SEQ ID NO: 125542 - protein, 10 aa, synthetic construct
ETGRGDRGQI

SEQ ID NO: 125543 - protein, 10 aa, synthetic construct
ETARGDRGQI

SEQ ID NO: 125544 - protein, 10 aa, synthetic construct
ETVRGDRGQI

SEQ ID NO: 125545 - protein, 10 aa, synthetic construct
ETPRGDRGQI

SEQ ID NO: 125546 - protein, 10 aa, synthetic construct
ETLRGDRGQI

SEQ ID NO: 125547 - protein, 10 aa, synthetic construct
ETIRGDRGQI

SEQ ID NO: 125548 - protein, 10 aa, synthetic construct
ETMRGDRGQI

SEQ ID NO: 125549 - protein, 10 aa, synthetic construct
ETWRGDRGQI

SEQ ID NO: 125550 - protein, 10 aa, synthetic construct
ETFRGDRGQI

SEQ ID NO: 125551 - protein, 10 aa, synthetic construct
ETKRGDRGQI

SEQ ID NO: 125552 - protein, 10 aa, synthetic construct
ETRRGDRGQI

SEQ ID NO: 125553 - protein, 10 aa, synthetic construct
ETHRGDRGQI

SEQ ID NO: 125554 - protein, 10 aa, synthetic construct
ETSRGDRGQI

SEQ ID NO: 125555 - protein, 10 aa, synthetic construct
ETTRGDRGQI

SEQ ID NO: 125556 - protein, 10 aa, synthetic construct
ETYRGDRGQI

SEQ ID NO: 125557 - protein, 10 aa, synthetic construct
ETNRGDRGQI

SEQ ID NO: 125558 - protein, 10 aa, synthetic construct
ETQRGDRGQI

SEQ ID NO: 125559 - protein, 10 aa, synthetic construct
ETDRGDRGQI

SEQ ID NO: 125560 - protein, 10 aa, synthetic construct
ETERGDRGQI

SEQ ID NO: 125561 - protein, 10 aa, synthetic construct
EYGRGDRGQI

SEQ ID NO: 125562 - protein, 10 aa, synthetic construct
EYARGDRGQI

SEQ ID NO: 125563 - protein, 10 aa, synthetic construct
EYVRGDRGQI

SEQ ID NO: 125564 - protein, 10 aa, synthetic construct
EYPRGDRGQI

SEQ ID NO: 125565 - protein, 10 aa, synthetic construct
EYLRGDRGQI

SEQ ID NO: 125566 - protein, 10 aa, synthetic construct
EYIRGDRGQI

SEQ ID NO: 125567 - protein, 10 aa, synthetic construct
EYMRGDRGQI

SEQ ID NO: 125568 - protein, 10 aa, synthetic construct
EYWRGDRGQI

SEQ ID NO: 125569 - protein, 10 aa, synthetic construct
EYFRGDRGQI

SEQ ID NO: 125570 - protein, 10 aa, synthetic construct
EYKRGDRGQI

SEQ ID NO: 125571 - protein, 10 aa, synthetic construct
EYRRGDRGQI

SEQ ID NO: 125572 - protein, 10 aa, synthetic construct
EYHRGDRGQI

SEQ ID NO: 125573 - protein, 10 aa, synthetic construct
EYSRGDRGQI

SEQ ID NO: 125574 - protein, 10 aa, synthetic construct
EYTRGDRGQI

SEQ ID NO: 125575 - protein, 10 aa, synthetic construct
EYYRGDRGQI

SEQ ID NO: 125576 - protein, 10 aa, synthetic construct
EYNRGDRGQI

SEQ ID NO: 125577 - protein, 10 aa, synthetic construct
EYQRGDRGQI

SEQ ID NO: 125578 - protein, 10 aa, synthetic construct
EYDRGDRGQI

SEQ ID NO: 125579 - protein, 10 aa, synthetic construct
EYERGDRGQI

SEQ ID NO: 125580 - protein, 10 aa, synthetic construct
ENGRGDRGQI

SEQ ID NO: 125581 - protein, 10 aa, synthetic construct
ENARGDRGQI

SEQ ID NO: 125582 - protein, 10 aa, synthetic construct
ENVRGDRGQI

SEQ ID NO: 125583 - protein, 10 aa, synthetic construct
ENPRGDRGQI

SEQ ID NO: 125584 - protein, 10 aa, synthetic construct
ENLRGDRGQI

SEQ ID NO: 125585 - protein, 10 aa, synthetic construct
ENIRGDRGQI

SEQ ID NO: 125586 - protein, 10 aa, synthetic construct
ENMRGDRGQI

SEQ ID NO: 125587 - protein, 10 aa, synthetic construct
ENWRGDRGQI

SEQ ID NO: 125588 - protein, 10 aa, synthetic construct
ENFRGDRGQI

SEQ ID NO: 125589 - protein, 10 aa, synthetic construct
ENKRGDRGQI

SEQ ID NO: 125590 - protein, 10 aa, synthetic construct
ENRRGDRGQI

SEQ ID NO: 125591 - protein, 10 aa, synthetic construct
ENHRGDRGQI

SEQ ID NO: 125592 - protein, 10 aa, synthetic construct
ENSRGDRGQI

SEQ ID NO: 125593 - protein, 10 aa, synthetic construct
ENTRGDRGQI

SEQ ID NO: 125594 - protein, 10 aa, synthetic construct
ENYRGDRGQI

SEQ ID NO: 125595 - protein, 10 aa, synthetic construct
ENNRGDRGQI

SEQ ID NO: 125596 - protein, 10 aa, synthetic construct
ENQRGDRGQI

SEQ ID NO: 125597 - protein, 10 aa, synthetic construct
ENDRGDRGQI

SEQ ID NO: 125598 - protein, 10 aa, synthetic construct
ENERGDRGQI

SEQ ID NO: 125599 - protein, 10 aa, synthetic construct
EQGRGDRGQI

SEQ ID NO: 125600 - protein, 10 aa, synthetic construct
EQARGDRGQI

SEQ ID NO: 125601 - protein, 10 aa, synthetic construct
EQVRGDRGQI

SEQ ID NO: 125602 - protein, 10 aa, synthetic construct
EQPRGDRGQI

SEQ ID NO: 125603 - protein, 10 aa, synthetic construct
EQLRGDRGQI

SEQ ID NO: 125604 - protein, 10 aa, synthetic construct
EQIRGDRGQI

SEQ ID NO: 125605 - protein, 10 aa, synthetic construct
EQMRGDRGQI

SEQ ID NO: 125606 - protein, 10 aa, synthetic construct
EQWRGDRGQI

SEQ ID NO: 125607 - protein, 10 aa, synthetic construct
EQFRGDRGQI

SEQ ID NO: 125608 - protein, 10 aa, synthetic construct
EQKRGDRGQI

SEQ ID NO: 125609 - protein, 10 aa, synthetic construct
EQRRGDRGQI

SEQ ID NO: 125610 - protein, 10 aa, synthetic construct
EQHRGDRGQI

SEQ ID NO: 125611 - protein, 10 aa, synthetic construct
EQSRGDRGQI

SEQ ID NO: 125612 - protein, 10 aa, synthetic construct
EQTRGDRGQI

SEQ ID NO: 125613 - protein, 10 aa, synthetic construct
EQYRGDRGQI

SEQ ID NO: 125614 - protein, 10 aa, synthetic construct
EQNRGDRGQI

SEQ ID NO: 125615 - protein, 10 aa, synthetic construct
EQQRGDRGQI

SEQ ID NO: 125616 - protein, 10 aa, synthetic construct
EQDRGDRGQI

SEQ ID NO: 125617 - protein, 10 aa, synthetic construct
EQERGDRGQI

SEQ ID NO: 125618 - protein, 10 aa, synthetic construct
EDGRGDRGQI

SEQ ID NO: 125619 - protein, 10 aa, synthetic construct
EDARGDRGQI

SEQ ID NO: 125620 - protein, 10 aa, synthetic construct
EDVRGDRGQI

SEQ ID NO: 125621 - protein, 10 aa, synthetic construct
EDPRGDRGQI

SEQ ID NO: 125622 - protein, 10 aa, synthetic construct
EDLRGDRGQI

SEQ ID NO: 125623 - protein, 10 aa, synthetic construct
EDIRGDRGQI

SEQ ID NO: 125624 - protein, 10 aa, synthetic construct
EDMRGDRGQI

SEQ ID NO: 125625 - protein, 10 aa, synthetic construct
EDWRGDRGQI

SEQ ID NO: 125626 - protein, 10 aa, synthetic construct
EDFRGDRGQI

SEQ ID NO: 125627 - protein, 10 aa, synthetic construct
EDKRGDRGQI

SEQ ID NO: 125628 - protein, 10 aa, synthetic construct
EDRRGDRGQI

SEQ ID NO: 125629 - protein, 10 aa, synthetic construct
EDHRGDRGQI

SEQ ID NO: 125630 - protein, 10 aa, synthetic construct
EDSRGDRGQI

SEQ ID NO: 125631 - protein, 10 aa, synthetic construct
EDTRGDRGQI

SEQ ID NO: 125632 - protein, 10 aa, synthetic construct
EDYRGDRGQI

SEQ ID NO: 125633 - protein, 10 aa, synthetic construct
EDNRGDRGQI

SEQ ID NO: 125634 - protein, 10 aa, synthetic construct
EDQRGDRGQI

SEQ ID NO: 125635 - protein, 10 aa, synthetic construct
EDDRGDRGQI

SEQ ID NO: 125636 - protein, 10 aa, synthetic construct
EDERGDRGQI

SEQ ID NO: 125637 - protein, 10 aa, synthetic construct
EEGRGDRGQI

SEQ ID NO: 125638 - protein, 10 aa, synthetic construct
EEARGDRGQI

SEQ ID NO: 125639 - protein, 10 aa, synthetic construct
EEVRGDRGQI

SEQ ID NO: 125640 - protein, 10 aa, synthetic construct
EEPRGDRGQI

SEQ ID NO: 125641 - protein, 10 aa, synthetic construct
EELRGDRGQI

SEQ ID NO: 125642 - protein, 10 aa, synthetic construct
EEIRGDRGQI

SEQ ID NO: 125643 - protein, 10 aa, synthetic construct
EEMRGDRGQI

SEQ ID NO: 125644 - protein, 10 aa, synthetic construct
EEWRGDRGQI

SEQ ID NO: 125645 - protein, 10 aa, synthetic construct
EEFRGDRGQI

SEQ ID NO: 125646 - protein, 10 aa, synthetic construct
EEKRGDRGQI

SEQ ID NO: 125647 - protein, 10 aa, synthetic construct
EERRGDRGQI

SEQ ID NO: 125648 - protein, 10 aa, synthetic construct
EEHRGDRGQI

SEQ ID NO: 125649 - protein, 10 aa, synthetic construct
EESRGDRGQI

SEQ ID NO: 125650 - protein, 10 aa, synthetic construct
EETRGDRGQI

SEQ ID NO: 125651 - protein, 10 aa, synthetic construct
EEYRGDRGQI

SEQ ID NO: 125652 - protein, 10 aa, synthetic construct
EENRGDRGQI

SEQ ID NO: 125653 - protein, 10 aa, synthetic construct
EEQRGDRGQI

SEQ ID NO: 125654 - protein, 10 aa, synthetic construct
EEDRGDRGQI

SEQ ID NO: 125655 - protein, 10 aa, synthetic construct
EEERGDRGQI

SEQ ID NO: 125656 - protein, 10 aa, synthetic construct
NGGRGDRGQI

SEQ ID NO: 125657 - protein, 10 aa, synthetic construct
NGARGDRGQI

SEQ ID NO: 125658 - protein, 10 aa, synthetic construct
NGVRGDRGQI

SEQ ID NO: 125659 - protein, 10 aa, synthetic construct
NGPRGDRGQI

SEQ ID NO: 125660 - protein, 10 aa, synthetic construct
NGLRGDRGQI

SEQ ID NO: 125661 - protein, 10 aa, synthetic construct
NGIRGDRGQI

SEQ ID NO: 125662 - protein, 10 aa, synthetic construct
NGMRGDRGQI

SEQ ID NO: 125663 - protein, 10 aa, synthetic construct
NGWRGDRGQI

SEQ ID NO: 125664 - protein, 10 aa, synthetic construct
NGFRGDRGQI

SEQ ID NO: 125665 - protein, 10 aa, synthetic construct
NGKRGDRGQI

SEQ ID NO: 125666 - protein, 10 aa, synthetic construct
NGRRGDRGQI

SEQ ID NO: 125667 - protein, 10 aa, synthetic construct
NGHRGDRGQI

SEQ ID NO: 125668 - protein, 10 aa, synthetic construct
NGSRGDRGQI

SEQ ID NO: 125669 - protein, 10 aa, synthetic construct
NGTRGDRGQI

SEQ ID NO: 125670 - protein, 10 aa, synthetic construct
NGYRGDRGQI

SEQ ID NO: 125671 - protein, 10 aa, synthetic construct
NGNRGDRGQI

SEQ ID NO: 125672 - protein, 10 aa, synthetic construct
NGQRGDRGQI

SEQ ID NO: 125673 - protein, 10 aa, synthetic construct
NGDRGDRGQI

SEQ ID NO: 125674 - protein, 10 aa, synthetic construct
NGERGDRGQI

SEQ ID NO: 125675 - protein, 10 aa, synthetic construct
NAGRGDRGQI

SEQ ID NO: 125676 - protein, 10 aa, synthetic construct
NAARGDRGQI

SEQ ID NO: 125677 - protein, 10 aa, synthetic construct
NAVRGDRGQI

SEQ ID NO: 125678 - protein, 10 aa, synthetic construct
NAPRGDRGQI

SEQ ID NO: 125679 - protein, 10 aa, synthetic construct
NALRGDRGQI

SEQ ID NO: 125680 - protein, 10 aa, synthetic construct
NAIRGDRGQI

SEQ ID NO: 125681 - protein, 10 aa, synthetic construct
NAMRGDRGQI

SEQ ID NO: 125682 - protein, 10 aa, synthetic construct
NAWRGDRGQI

SEQ ID NO: 125683 - protein, 10 aa, synthetic construct
NAFRGDRGQI

SEQ ID NO: 125684 - protein, 10 aa, synthetic construct
NAKRGDRGQI

SEQ ID NO: 125685 - protein, 10 aa, synthetic construct
NARRGDRGQI

SEQ ID NO: 125686 - protein, 10 aa, synthetic construct
NAHRGDRGQI

SEQ ID NO: 125687 - protein, 10 aa, synthetic construct
NASRGDRGQI

SEQ ID NO: 125688 - protein, 10 aa, synthetic construct
NATRGDRGQI

SEQ ID NO: 125689 - protein, 10 aa, synthetic construct
NAYRGDRGQI

SEQ ID NO: 125690 - protein, 10 aa, synthetic construct
NANRGDRGQI

SEQ ID NO: 125691 - protein, 10 aa, synthetic construct
NAQRGDRGQI

SEQ ID NO: 125692 - protein, 10 aa, synthetic construct
NADRGDRGQI

SEQ ID NO: 125693 - protein, 10 aa, synthetic construct
NAERGDRGQI

SEQ ID NO: 125694 - protein, 10 aa, synthetic construct
NVGRGDRGQI

SEQ ID NO: 125695 - protein, 10 aa, synthetic construct
NVARGDRGQI

SEQ ID NO: 125696 - protein, 10 aa, synthetic construct
NVVRGDRGQI

SEQ ID NO: 125697 - protein, 10 aa, synthetic construct
NVPRGDRGQI

SEQ ID NO: 125698 - protein, 10 aa, synthetic construct
NVLRGDRGQI

SEQ ID NO: 125699 - protein, 10 aa, synthetic construct
NVIRGDRGQI

SEQ ID NO: 125700 - protein, 10 aa, synthetic construct
NVMRGDRGQI

SEQ ID NO: 125701 - protein, 10 aa, synthetic construct
NVWRGDRGQI

SEQ ID NO: 125702 - protein, 10 aa, synthetic construct
NVFRGDRGQI

SEQ ID NO: 125703 - protein, 10 aa, synthetic construct
NVKRGDRGQI

SEQ ID NO: 125704 - protein, 10 aa, synthetic construct
NVRRGDRGQI

SEQ ID NO: 125705 - protein, 10 aa, synthetic construct
NVHRGDRGQI

SEQ ID NO: 125706 - protein, 10 aa, synthetic construct
NVSRGDRGQI

SEQ ID NO: 125707 - protein, 10 aa, synthetic construct
NVTRGDRGQI

SEQ ID NO: 125708 - protein, 10 aa, synthetic construct
NVYRGDRGQI

SEQ ID NO: 125709 - protein, 10 aa, synthetic construct
NVNRGDRGQI

SEQ ID NO: 125710 - protein, 10 aa, synthetic construct
NVQRGDRGQI

SEQ ID NO: 125711 - protein, 10 aa, synthetic construct
NVDRGDRGQI

SEQ ID NO: 125712 - protein, 10 aa, synthetic construct
NVERGDRGQI

SEQ ID NO: 125713 - protein, 10 aa, synthetic construct
NPGRGDRGQI

SEQ ID NO: 125714 - protein, 10 aa, synthetic construct
NPARGDRGQI

SEQ ID NO: 125715 - protein, 10 aa, synthetic construct
NPVRGDRGQI

SEQ ID NO: 125716 - protein, 10 aa, synthetic construct
NPPRGDRGQI

SEQ ID NO: 125717 - protein, 10 aa, synthetic construct
NPLRGDRGQI

SEQ ID NO: 125718 - protein, 10 aa, synthetic construct
NPIRGDRGQI

SEQ ID NO: 125719 - protein, 10 aa, synthetic construct
NPMRGDRGQI

SEQ ID NO: 125720 - protein, 10 aa, synthetic construct
NPWRGDRGQI

SEQ ID NO: 125721 - protein, 10 aa, synthetic construct
NPFRGDRGQI

SEQ ID NO: 125722 - protein, 10 aa, synthetic construct
NPKRGDRGQI

SEQ ID NO: 125723 - protein, 10 aa, synthetic construct
NPRRGDRGQI

SEQ ID NO: 125724 - protein, 10 aa, synthetic construct
NPHRGDRGQI

SEQ ID NO: 125725 - protein, 10 aa, synthetic construct
NPSRGDRGQI

SEQ ID NO: 125726 - protein, 10 aa, synthetic construct
NPTRGDRGQI

SEQ ID NO: 125727 - protein, 10 aa, synthetic construct
NPYRGDRGQI

SEQ ID NO: 125728 - protein, 10 aa, synthetic construct
NPNRGDRGQI

SEQ ID NO: 125729 - protein, 10 aa, synthetic construct
NPQRGDRGQI

SEQ ID NO: 125730 - protein, 10 aa, synthetic construct
NPDRGDRGQI

SEQ ID NO: 125731 - protein, 10 aa, synthetic construct
NPERGDRGQI

SEQ ID NO: 125732 - protein, 10 aa, synthetic construct
NLGRGDRGQI

SEQ ID NO: 125733 - protein, 10 aa, synthetic construct
NLARGDRGQI

SEQ ID NO: 125734 - protein, 10 aa, synthetic construct
NLVRGDRGQI

SEQ ID NO: 125735 - protein, 10 aa, synthetic construct
NLPRGDRGQI

SEQ ID NO: 125736 - protein, 10 aa, synthetic construct
NLLRGDRGQI

SEQ ID NO: 125737 - protein, 10 aa, synthetic construct
NLIRGDRGQI

SEQ ID NO: 125738 - protein, 10 aa, synthetic construct
NLMRGDRGQI

SEQ ID NO: 125739 - protein, 10 aa, synthetic construct
NLWRGDRGQI

SEQ ID NO: 125740 - protein, 10 aa, synthetic construct
NLFRGDRGQI

SEQ ID NO: 125741 - protein, 10 aa, synthetic construct
NLKRGDRGQI

SEQ ID NO: 125742 - protein, 10 aa, synthetic construct
NLRRGDRGQI

SEQ ID NO: 125743 - protein, 10 aa, synthetic construct
NLHRGDRGQI

SEQ ID NO: 125744 - protein, 10 aa, synthetic construct
NLSRGDRGQI

SEQ ID NO: 125745 - protein, 10 aa, synthetic construct
NLTRGDRGQI

SEQ ID NO: 125746 - protein, 10 aa, synthetic construct
NLYRGDRGQI

SEQ ID NO: 125747 - protein, 10 aa, synthetic construct
NLNRGDRGQI

SEQ ID NO: 125748 - protein, 10 aa, synthetic construct
NLQRGDRGQI

SEQ ID NO: 125749 - protein, 10 aa, synthetic construct
NLDRGDRGQI

SEQ ID NO: 125750 - protein, 10 aa, synthetic construct
NLERGDRGQI

SEQ ID NO: 125751 - protein, 10 aa, synthetic construct
NIGRGDRGQI

SEQ ID NO: 125752 - protein, 10 aa, synthetic construct
NIARGDRGQI

SEQ ID NO: 125753 - protein, 10 aa, synthetic construct
NIVRGDRGQI

SEQ ID NO: 125754 - protein, 10 aa, synthetic construct
NIPRGDRGQI

SEQ ID NO: 125755 - protein, 10 aa, synthetic construct
NILRGDRGQI

SEQ ID NO: 125756 - protein, 10 aa, synthetic construct
NIIRGDRGQI

SEQ ID NO: 125757 - protein, 10 aa, synthetic construct
NIMRGDRGQI

SEQ ID NO: 125758 - protein, 10 aa, synthetic construct
NIWRGDRGQI

SEQ ID NO: 125759 - protein, 10 aa, synthetic construct
NIFRGDRGQI

SEQ ID NO: 125760 - protein, 10 aa, synthetic construct
NIKRGDRGQI

SEQ ID NO: 125761 - protein, 10 aa, synthetic construct
NIRRGDRGQI

SEQ ID NO: 125762 - protein, 10 aa, synthetic construct
NIHRGDRGQI

SEQ ID NO: 125763 - protein, 10 aa, synthetic construct
NISRGDRGQI

SEQ ID NO: 125764 - protein, 10 aa, synthetic construct
NITRGDRGQI

SEQ ID NO: 125765 - protein, 10 aa, synthetic construct
NIYRGDRGQI

SEQ ID NO: 125766 - protein, 10 aa, synthetic construct
NINRGDRGQI

SEQ ID NO: 125767 - protein, 10 aa, synthetic construct
NIQRGDRGQI

SEQ ID NO: 125768 - protein, 10 aa, synthetic construct
NIDRGDRGQI

SEQ ID NO: 125769 - protein, 10 aa, synthetic construct
NIERGDRGQI

SEQ ID NO: 125770 - protein, 10 aa, synthetic construct
NMGRGDRGQI

SEQ ID NO: 125771 - protein, 10 aa, synthetic construct
NMARGDRGQI

SEQ ID NO: 125772 - protein, 10 aa, synthetic construct
NMVRGDRGQI

SEQ ID NO: 125773 - protein, 10 aa, synthetic construct
NMPRGDRGQI

SEQ ID NO: 125774 - protein, 10 aa, synthetic construct
NMLRGDRGQI

SEQ ID NO: 125775 - protein, 10 aa, synthetic construct
NMIRGDRGQI

SEQ ID NO: 125776 - protein, 10 aa, synthetic construct
NMMRGDRGQI

SEQ ID NO: 125777 - protein, 10 aa, synthetic construct
NMWRGDRGQI

SEQ ID NO: 125778 - protein, 10 aa, synthetic construct
NMFRGDRGQI

SEQ ID NO: 125779 - protein, 10 aa, synthetic construct
NMKRGDRGQI

SEQ ID NO: 125780 - protein, 10 aa, synthetic construct
NMRRGDRGQI

SEQ ID NO: 125781 - protein, 10 aa, synthetic construct
NMHRGDRGQI

SEQ ID NO: 125782 - protein, 10 aa, synthetic construct
NMSRGDRGQI

SEQ ID NO: 125783 - protein, 10 aa, synthetic construct
NMTRGDRGQI

SEQ ID NO: 125784 - protein, 10 aa, synthetic construct
NMYRGDRGQI

SEQ ID NO: 125785 - protein, 10 aa, synthetic construct
NMNRGDRGQI

SEQ ID NO: 125786 - protein, 10 aa, synthetic construct
NMQRGDRGQI

SEQ ID NO: 125787 - protein, 10 aa, synthetic construct
NMDRGDRGQI

SEQ ID NO: 125788 - protein, 10 aa, synthetic construct
NMERGDRGQI

SEQ ID NO: 125789 - protein, 10 aa, synthetic construct
NWGRGDRGQI

SEQ ID NO: 125790 - protein, 10 aa, synthetic construct
NWARGDRGQI

SEQ ID NO: 125791 - protein, 10 aa, synthetic construct
NWVRGDRGQI

SEQ ID NO: 125792 - protein, 10 aa, synthetic construct
NWPRGDRGQI

SEQ ID NO: 125793 - protein, 10 aa, synthetic construct
NWLRGDRGQI

SEQ ID NO: 125794 - protein, 10 aa, synthetic construct
NWIRGDRGQI

SEQ ID NO: 125795 - protein, 10 aa, synthetic construct
NWMRGDRGQI

SEQ ID NO: 125796 - protein, 10 aa, synthetic construct
NWWRGDRGQI

SEQ ID NO: 125797 - protein, 10 aa, synthetic construct
NWFRGDRGQI

SEQ ID NO: 125798 - protein, 10 aa, synthetic construct
NWKRGDRGQI

SEQ ID NO: 125799 - protein, 10 aa, synthetic construct
NWRRGDRGQI

SEQ ID NO: 125800 - protein, 10 aa, synthetic construct
NWHRGDRGQI

SEQ ID NO: 125801 - protein, 10 aa, synthetic construct
NWSRGDRGQI

SEQ ID NO: 125802 - protein, 10 aa, synthetic construct
NWTRGDRGQI

SEQ ID NO: 125803 - protein, 10 aa, synthetic construct
NWYRGDRGQI

SEQ ID NO: 125804 - protein, 10 aa, synthetic construct
NWNRGDRGQI

SEQ ID NO: 125805 - protein, 10 aa, synthetic construct
NWQRGDRGQI

SEQ ID NO: 125806 - protein, 10 aa, synthetic construct
NWDRGDRGQI

SEQ ID NO: 125807 - protein, 10 aa, synthetic construct
NWERGDRGQI

SEQ ID NO: 125808 - protein, 10 aa, synthetic construct
NFGRGDRGQI

SEQ ID NO: 125809 - protein, 10 aa, synthetic construct
NFARGDRGQI

SEQ ID NO: 125810 - protein, 10 aa, synthetic construct
NFVRGDRGQI

SEQ ID NO: 125811 - protein, 10 aa, synthetic construct
NFPRGDRGQI

SEQ ID NO: 125812 - protein, 10 aa, synthetic construct
NFLRGDRGQI

SEQ ID NO: 125813 - protein, 10 aa, synthetic construct
NFIRGDRGQI

SEQ ID NO: 125814 - protein, 10 aa, synthetic construct
NFMRGDRGQI

SEQ ID NO: 125815 - protein, 10 aa, synthetic construct
NFWRGDRGQI

SEQ ID NO: 125816 - protein, 10 aa, synthetic construct
NFFRGDRGQI

SEQ ID NO: 125817 - protein, 10 aa, synthetic construct
NFKRGDRGQI

SEQ ID NO: 125818 - protein, 10 aa, synthetic construct
NFRRGDRGQI

SEQ ID NO: 125819 - protein, 10 aa, synthetic construct
NFHRGDRGQI

SEQ ID NO: 125820 - protein, 10 aa, synthetic construct
NFSRGDRGQI

SEQ ID NO: 125821 - protein, 10 aa, synthetic construct
NFTRGDRGQI

SEQ ID NO: 125822 - protein, 10 aa, synthetic construct
NFYRGDRGQI

SEQ ID NO: 125823 - protein, 10 aa, synthetic construct
NFNRGDRGQI

SEQ ID NO: 125824 - protein, 10 aa, synthetic construct
NFQRGDRGQI

SEQ ID NO: 125825 - protein, 10 aa, synthetic construct
NFDRGDRGQI

SEQ ID NO: 125826 - protein, 10 aa, synthetic construct
NFERGDRGQI

SEQ ID NO: 125827 - protein, 10 aa, synthetic construct
NKGRGDRGQI

SEQ ID NO: 125828 - protein, 10 aa, synthetic construct
NKARGDRGQI

SEQ ID NO: 125829 - protein, 10 aa, synthetic construct
NKVRGDRGQI

SEQ ID NO: 125830 - protein, 10 aa, synthetic construct
NKPRGDRGQI

SEQ ID NO: 125831 - protein, 10 aa, synthetic construct
NKLRGDRGQI

SEQ ID NO: 125832 - protein, 10 aa, synthetic construct
NKIRGDRGQI

SEQ ID NO: 125833 - protein, 10 aa, synthetic construct
NKMRGDRGQI

SEQ ID NO: 125834 - protein, 10 aa, synthetic construct
NKWRGDRGQI

SEQ ID NO: 125835 - protein, 10 aa, synthetic construct
NKFRGDRGQI

SEQ ID NO: 125836 - protein, 10 aa, synthetic construct
NKKRGDRGQI

SEQ ID NO: 125837 - protein, 10 aa, synthetic construct
NKRRGDRGQI

SEQ ID NO: 125838 - protein, 10 aa, synthetic construct
NKHRGDRGQI

SEQ ID NO: 125839 - protein, 10 aa, synthetic construct
NKSRGDRGQI

SEQ ID NO: 125840 - protein, 10 aa, synthetic construct
NKTRGDRGQI

SEQ ID NO: 125841 - protein, 10 aa, synthetic construct
NKYRGDRGQI

SEQ ID NO: 125842 - protein, 10 aa, synthetic construct
NKNRGDRGQI

SEQ ID NO: 125843 - protein, 10 aa, synthetic construct
NKQRGDRGQI

SEQ ID NO: 125844 - protein, 10 aa, synthetic construct
NKDRGDRGQI

SEQ ID NO: 125845 - protein, 10 aa, synthetic construct
NKERGDRGQI

SEQ ID NO: 125846 - protein, 10 aa, synthetic construct
NRGRGDRGQI

SEQ ID NO: 125847 - protein, 10 aa, synthetic construct
NRARGDRGQI

SEQ ID NO: 125848 - protein, 10 aa, synthetic construct
NRVRGDRGQI

SEQ ID NO: 125849 - protein, 10 aa, synthetic construct
NRPRGDRGQI

SEQ ID NO: 125850 - protein, 10 aa, synthetic construct
NRLRGDRGQI

SEQ ID NO: 125851 - protein, 10 aa, synthetic construct
NRIRGDRGQI

SEQ ID NO: 125852 - protein, 10 aa, synthetic construct
NRMRGDRGQI

SEQ ID NO: 125853 - protein, 10 aa, synthetic construct
NRWRGDRGQI

SEQ ID NO: 125854 - protein, 10 aa, synthetic construct
NRFRGDRGQI

SEQ ID NO: 125855 - protein, 10 aa, synthetic construct
NRKRGDRGQI

SEQ ID NO: 125856 - protein, 10 aa, synthetic construct
NRRRGDRGQI

SEQ ID NO: 125857 - protein, 10 aa, synthetic construct
NRHRGDRGQI

SEQ ID NO: 125858 - protein, 10 aa, synthetic construct
NRSRGDRGQI

SEQ ID NO: 125859 - protein, 10 aa, synthetic construct
NRTRGDRGQI

SEQ ID NO: 125860 - protein, 10 aa, synthetic construct
NRYRGDRGQI

SEQ ID NO: 125861 - protein, 10 aa, synthetic construct
NRNRGDRGQI

SEQ ID NO: 125862 - protein, 10 aa, synthetic construct
NRQRGDRGQI

SEQ ID NO: 125863 - protein, 10 aa, synthetic construct
NRDRGDRGQI

SEQ ID NO: 125864 - protein, 10 aa, synthetic construct
NRERGDRGQI

SEQ ID NO: 125865 - protein, 10 aa, synthetic construct
NHGRGDRGQI

SEQ ID NO: 125866 - protein, 10 aa, synthetic construct
NHARGDRGQI

SEQ ID NO: 125867 - protein, 10 aa, synthetic construct
NHVRGDRGQI

SEQ ID NO: 125868 - protein, 10 aa, synthetic construct
NHPRGDRGQI

SEQ ID NO: 125869 - protein, 10 aa, synthetic construct
NHLRGDRGQI

SEQ ID NO: 125870 - protein, 10 aa, synthetic construct
NHIRGDRGQI

SEQ ID NO: 125871 - protein, 10 aa, synthetic construct
NHMRGDRGQI

SEQ ID NO: 125872 - protein, 10 aa, synthetic construct
NHWRGDRGQI

SEQ ID NO: 125873 - protein, 10 aa, synthetic construct
NHFRGDRGQI

SEQ ID NO: 125874 - protein, 10 aa, synthetic construct
NHKRGDRGQI

SEQ ID NO: 125875 - protein, 10 aa, synthetic construct
NHRRGDRGQI

SEQ ID NO: 125876 - protein, 10 aa, synthetic construct
NHHRGDRGQI

SEQ ID NO: 125877 - protein, 10 aa, synthetic construct
NHSRGDRGQI

SEQ ID NO: 125878 - protein, 10 aa, synthetic construct
NHTRGDRGQI

SEQ ID NO: 125879 - protein, 10 aa, synthetic construct
NHYRGDRGQI

SEQ ID NO: 125880 - protein, 10 aa, synthetic construct
NHNRGDRGQI

SEQ ID NO: 125881 - protein, 10 aa, synthetic construct
NHQRGDRGQI

SEQ ID NO: 125882 - protein, 10 aa, synthetic construct
NHDRGDRGQI

SEQ ID NO: 125883 - protein, 10 aa, synthetic construct
NHERGDRGQI

SEQ ID NO: 125884 - protein, 10 aa, synthetic construct
NSGRGDRGQI

SEQ ID NO: 125885 - protein, 10 aa, synthetic construct
NSARGDRGQI

SEQ ID NO: 125886 - protein, 10 aa, synthetic construct
NSVRGDRGQI

SEQ ID NO: 125887 - protein, 10 aa, synthetic construct
NSPRGDRGQI

SEQ ID NO: 125888 - protein, 10 aa, synthetic construct
NSLRGDRGQI

SEQ ID NO: 125889 - protein, 10 aa, synthetic construct
NSIRGDRGQI

SEQ ID NO: 125890 - protein, 10 aa, synthetic construct
NSMRGDRGQI

SEQ ID NO: 125891 - protein, 10 aa, synthetic construct
NSWRGDRGQI

SEQ ID NO: 125892 - protein, 10 aa, synthetic construct
NSFRGDRGQI

SEQ ID NO: 125893 - protein, 10 aa, synthetic construct
NSKRGDRGQI

SEQ ID NO: 125894 - protein, 10 aa, synthetic construct
NSRRGDRGQI

SEQ ID NO: 125895 - protein, 10 aa, synthetic construct
NSHRGDRGQI

SEQ ID NO: 125896 - protein, 10 aa, synthetic construct
NSSRGDRGQI

SEQ ID NO: 125897 - protein, 10 aa, synthetic construct
NSTRGDRGQI

SEQ ID NO: 125898 - protein, 10 aa, synthetic construct
NSYRGDRGQI

SEQ ID NO: 125899 - protein, 10 aa, synthetic construct
NSNRGDRGQI

SEQ ID NO: 125900 - protein, 10 aa, synthetic construct
NSQRGDRGQI

SEQ ID NO: 125901 - protein, 10 aa, synthetic construct
NSDRGDRGQI

SEQ ID NO: 125902 - protein, 10 aa, synthetic construct
NSERGDRGQI

SEQ ID NO: 125903 - protein, 10 aa, synthetic construct
NTGRGDRGQI

SEQ ID NO: 125904 - protein, 10 aa, synthetic construct
NTARGDRGQI

SEQ ID NO: 125905 - protein, 10 aa, synthetic construct
NTVRGDRGQI

SEQ ID NO: 125906 - protein, 10 aa, synthetic construct
NTPRGDRGQI

SEQ ID NO: 125907 - protein, 10 aa, synthetic construct
NTLRGDRGQI

SEQ ID NO: 125908 - protein, 10 aa, synthetic construct
NTIRGDRGQI

SEQ ID NO: 125909 - protein, 10 aa, synthetic construct
NTMRGDRGQI

SEQ ID NO: 125910 - protein, 10 aa, synthetic construct
NTWRGDRGQI

SEQ ID NO: 125911 - protein, 10 aa, synthetic construct
NTFRGDRGQI

SEQ ID NO: 125912 - protein, 10 aa, synthetic construct
NTKRGDRGQI

SEQ ID NO: 125913 - protein, 10 aa, synthetic construct
NTRRGDRGQI

SEQ ID NO: 125914 - protein, 10 aa, synthetic construct
NTHRGDRGQI

SEQ ID NO: 125915 - protein, 10 aa, synthetic construct
NTSRGDRGQI

SEQ ID NO: 125916 - protein, 10 aa, synthetic construct
NTTRGDRGQI

SEQ ID NO: 125917 - protein, 10 aa, synthetic construct
NTYRGDRGQI

SEQ ID NO: 125918 - protein, 10 aa, synthetic construct
NTNRGDRGQI

SEQ ID NO: 125919 - protein, 10 aa, synthetic construct
NTQRGDRGQI

SEQ ID NO: 125920 - protein, 10 aa, synthetic construct
NTDRGDRGQI

SEQ ID NO: 125921 - protein, 10 aa, synthetic construct
NTERGDRGQI

SEQ ID NO: 125922 - protein, 10 aa, synthetic construct
NYGRGDRGQI

SEQ ID NO: 125923 - protein, 10 aa, synthetic construct
NYARGDRGQI

SEQ ID NO: 125924 - protein, 10 aa, synthetic construct
NYVRGDRGQI

SEQ ID NO: 125925 - protein, 10 aa, synthetic construct
NYPRGDRGQI

SEQ ID NO: 125926 - protein, 10 aa, synthetic construct
NYLRGDRGQI

SEQ ID NO: 125927 - protein, 10 aa, synthetic construct
NYIRGDRGQI

SEQ ID NO: 125928 - protein, 10 aa, synthetic construct
NYMRGDRGQI

SEQ ID NO: 125929 - protein, 10 aa, synthetic construct
NYWRGDRGQI

SEQ ID NO: 125930 - protein, 10 aa, synthetic construct
NYFRGDRGQI

SEQ ID NO: 125931 - protein, 10 aa, synthetic construct
NYKRGDRGQI

SEQ ID NO: 125932 - protein, 10 aa, synthetic construct
NYRRGDRGQI

SEQ ID NO: 125933 - protein, 10 aa, synthetic construct
NYHRGDRGQI

SEQ ID NO: 125934 - protein, 10 aa, synthetic construct
NYSRGDRGQI

SEQ ID NO: 125935 - protein, 10 aa, synthetic construct
NYTRGDRGQI

SEQ ID NO: 125936 - protein, 10 aa, synthetic construct
NYYRGDRGQI

SEQ ID NO: 125937 - protein, 10 aa, synthetic construct
NYNRGDRGQI

SEQ ID NO: 125938 - protein, 10 aa, synthetic construct
NYQRGDRGQI

SEQ ID NO: 125939 - protein, 10 aa, synthetic construct
NYDRGDRGQI

SEQ ID NO: 125940 - protein, 10 aa, synthetic construct
NYERGDRGQI

SEQ ID NO: 125941 - protein, 10 aa, synthetic construct
NNGRGDRGQI

SEQ ID NO: 125942 - protein, 10 aa, synthetic construct
NNARGDRGQI

SEQ ID NO: 125943 - protein, 10 aa, synthetic construct
NNVRGDRGQI

SEQ ID NO: 125944 - protein, 10 aa, synthetic construct
NNPRGDRGQI

SEQ ID NO: 125945 - protein, 10 aa, synthetic construct
NNLRGDRGQI

SEQ ID NO: 125946 - protein, 10 aa, synthetic construct
NNIRGDRGQI

SEQ ID NO: 125947 - protein, 10 aa, synthetic construct
NNMRGDRGQI

SEQ ID NO: 125948 - protein, 10 aa, synthetic construct
NNWRGDRGQI

SEQ ID NO: 125949 - protein, 10 aa, synthetic construct
NNFRGDRGQI

SEQ ID NO: 125950 - protein, 10 aa, synthetic construct
NNKRGDRGQI

SEQ ID NO: 125951 - protein, 10 aa, synthetic construct
NNRRGDRGQI

SEQ ID NO: 125952 - protein, 10 aa, synthetic construct
NNHRGDRGQI

SEQ ID NO: 125953 - protein, 10 aa, synthetic construct
NNSRGDRGQI

SEQ ID NO: 125954 - protein, 10 aa, synthetic construct
NNTRGDRGQI

SEQ ID NO: 125955 - protein, 10 aa, synthetic construct
NNYRGDRGQI

SEQ ID NO: 125956 - protein, 10 aa, synthetic construct
NNNRGDRGQI

SEQ ID NO: 125957 - protein, 10 aa, synthetic construct
NNQRGDRGQI

SEQ ID NO: 125958 - protein, 10 aa, synthetic construct
NNDRGDRGQI

SEQ ID NO: 125959 - protein, 10 aa, synthetic construct
NNERGDRGQI

SEQ ID NO: 125960 - protein, 10 aa, synthetic construct
NQGRGDRGQI

SEQ ID NO: 125961 - protein, 10 aa, synthetic construct
NQARGDRGQI

SEQ ID NO: 125962 - protein, 10 aa, synthetic construct
NQVRGDRGQI

SEQ ID NO: 125963 - protein, 10 aa, synthetic construct
NQPRGDRGQI

SEQ ID NO: 125964 - protein, 10 aa, synthetic construct
NQLRGDRGQI

SEQ ID NO: 125965 - protein, 10 aa, synthetic construct
NQIRGDRGQI

SEQ ID NO: 125966 - protein, 10 aa, synthetic construct
NQMRGDRGQI

SEQ ID NO: 125967 - protein, 10 aa, synthetic construct
NQWRGDRGQI

SEQ ID NO: 125968 - protein, 10 aa, synthetic construct
NQFRGDRGQI

SEQ ID NO: 125969 - protein, 10 aa, synthetic construct
NQKRGDRGQI

SEQ ID NO: 125970 - protein, 10 aa, synthetic construct
NQRRGDRGQI

SEQ ID NO: 125971 - protein, 10 aa, synthetic construct
NQHRGDRGQI

SEQ ID NO: 125972 - protein, 10 aa, synthetic construct
NQSRGDRGQI

SEQ ID NO: 125973 - protein, 10 aa, synthetic construct
NQTRGDRGQI

SEQ ID NO: 125974 - protein, 10 aa, synthetic construct
NQYRGDRGQI

SEQ ID NO: 125975 - protein, 10 aa, synthetic construct
NQNRGDRGQI

SEQ ID NO: 125976 - protein, 10 aa, synthetic construct
NQQRGDRGQI

SEQ ID NO: 125977 - protein, 10 aa, synthetic construct
NQDRGDRGQI

SEQ ID NO: 125978 - protein, 10 aa, synthetic construct
NQERGDRGQI

SEQ ID NO: 125979 - protein, 10 aa, synthetic construct
NDGRGDRGQI

SEQ ID NO: 125980 - protein, 10 aa, synthetic construct
NDARGDRGQI

SEQ ID NO: 125981 - protein, 10 aa, synthetic construct
NDVRGDRGQI

SEQ ID NO: 125982 - protein, 10 aa, synthetic construct
NDPRGDRGQI

SEQ ID NO: 125983 - protein, 10 aa, synthetic construct
NDLRGDRGQI

SEQ ID NO: 125984 - protein, 10 aa, synthetic construct
NDIRGDRGQI

SEQ ID NO: 125985 - protein, 10 aa, synthetic construct
NDMRGDRGQI

SEQ ID NO: 125986 - protein, 10 aa, synthetic construct
NDWRGDRGQI

SEQ ID NO: 125987 - protein, 10 aa, synthetic construct
NDFRGDRGQI

SEQ ID NO: 125988 - protein, 10 aa, synthetic construct
NDKRGDRGQI

SEQ ID NO: 125989 - protein, 10 aa, synthetic construct
NDRRGDRGQI

SEQ ID NO: 125990 - protein, 10 aa, synthetic construct
NDHRGDRGQI

SEQ ID NO: 125991 - protein, 10 aa, synthetic construct
NDSRGDRGQI

SEQ ID NO: 125992 - protein, 10 aa, synthetic construct
NDTRGDRGQI

SEQ ID NO: 125993 - protein, 10 aa, synthetic construct
NDYRGDRGQI

SEQ ID NO: 125994 - protein, 10 aa, synthetic construct
NDNRGDRGQI

SEQ ID NO: 125995 - protein, 10 aa, synthetic construct
NDQRGDRGQI

SEQ ID NO: 125996 - protein, 10 aa, synthetic construct
NDDRGDRGQI

SEQ ID NO: 125997 - protein, 10 aa, synthetic construct
NDERGDRGQI

SEQ ID NO: 125998 - protein, 10 aa, synthetic construct
NEGRGDRGQI

SEQ ID NO: 125999 - protein, 10 aa, synthetic construct
NEARGDRGQI

SEQ ID NO: 126000 - protein, 10 aa, synthetic construct
NEVRGDRGQI

SEQ ID NO: 126001 - protein, 10 aa, synthetic construct
NEPRGDRGQI

SEQ ID NO: 126002 - protein, 10 aa, synthetic construct
NELRGDRGQI

SEQ ID NO: 126003 - protein, 10 aa, synthetic construct
NEIRGDRGQI

SEQ ID NO: 126004 - protein, 10 aa, synthetic construct
NEMRGDRGQI

SEQ ID NO: 126005 - protein, 10 aa, synthetic construct
NEWRGDRGQI

SEQ ID NO: 126006 - protein, 10 aa, synthetic construct
NEFRGDRGQI

SEQ ID NO: 126007 - protein, 10 aa, synthetic construct
NEKRGDRGQI

SEQ ID NO: 126008 - protein, 10 aa, synthetic construct
NERRGDRGQI

SEQ ID NO: 126009 - protein, 10 aa, synthetic construct
NEHRGDRGQI

SEQ ID NO: 126010 - protein, 10 aa, synthetic construct
NESRGDRGQI

SEQ ID NO: 126011 - protein, 10 aa, synthetic construct
NETRGDRGQI

SEQ ID NO: 126012 - protein, 10 aa, synthetic construct
NEYRGDRGQI

SEQ ID NO: 126013 - protein, 10 aa, synthetic construct
NENRGDRGQI

SEQ ID NO: 126014 - protein, 10 aa, synthetic construct
NEQRGDRGQI

SEQ ID NO: 126015 - protein, 10 aa, synthetic construct
NEDRGDRGQI

SEQ ID NO: 126016 - protein, 10 aa, synthetic construct
NEERGDRGQI

SEQ ID NO: 126017 - protein, 10 aa, synthetic construct
DGGRGDRGQI

SEQ ID NO: 126018 - protein, 10 aa, synthetic construct
DGARGDRGQI

SEQ ID NO: 126019 - protein, 10 aa, synthetic construct
DGVRGDRGQI

SEQ ID NO: 126020 - protein, 10 aa, synthetic construct
DGPRGDRGQI

SEQ ID NO: 126021 - protein, 10 aa, synthetic construct
DGLRGDRGQI

SEQ ID NO: 126022 - protein, 10 aa, synthetic construct
DGIRGDRGQI

SEQ ID NO: 126023 - protein, 10 aa, synthetic construct
DGMRGDRGQI

SEQ ID NO: 126024 - protein, 10 aa, synthetic construct
DGWRGDRGQI

SEQ ID NO: 126025 - protein, 10 aa, synthetic construct
DGFRGDRGQI

SEQ ID NO: 126026 - protein, 10 aa, synthetic construct
DGKRGDRGQI

SEQ ID NO: 126027 - protein, 10 aa, synthetic construct
DGRRGDRGQI

SEQ ID NO: 126028 - protein, 10 aa, synthetic construct
DGHRGDRGQI

SEQ ID NO: 126029 - protein, 10 aa, synthetic construct
DGSRGDRGQI

SEQ ID NO: 126030 - protein, 10 aa, synthetic construct
DGTRGDRGQI

SEQ ID NO: 126031 - protein, 10 aa, synthetic construct
DGYRGDRGQI

SEQ ID NO: 126032 - protein, 10 aa, synthetic construct
DGNRGDRGQI

SEQ ID NO: 126033 - protein, 10 aa, synthetic construct
DGQRGDRGQI

SEQ ID NO: 126034 - protein, 10 aa, synthetic construct
DGDRGDRGQI

SEQ ID NO: 126035 - protein, 10 aa, synthetic construct
DGERGDRGQI

SEQ ID NO: 126036 - protein, 10 aa, synthetic construct
DAGRGDRGQI

SEQ ID NO: 126037 - protein, 10 aa, synthetic construct
DAARGDRGQI

SEQ ID NO: 126038 - protein, 10 aa, synthetic construct
DAVRGDRGQI

SEQ ID NO: 126039 - protein, 10 aa, synthetic construct
DAPRGDRGQI

SEQ ID NO: 126040 - protein, 10 aa, synthetic construct
DALRGDRGQI

SEQ ID NO: 126041 - protein, 10 aa, synthetic construct
DAIRGDRGQI

SEQ ID NO: 126042 - protein, 10 aa, synthetic construct
DAMRGDRGQI

SEQ ID NO: 126043 - protein, 10 aa, synthetic construct
DAWRGDRGQI

SEQ ID NO: 126044 - protein, 10 aa, synthetic construct
DAFRGDRGQI

SEQ ID NO: 126045 - protein, 10 aa, synthetic construct
DAKRGDRGQI

SEQ ID NO: 126046 - protein, 10 aa, synthetic construct
DARRGDRGQI

SEQ ID NO: 126047 - protein, 10 aa, synthetic construct
DAHRGDRGQI

SEQ ID NO: 126048 - protein, 10 aa, synthetic construct
DASRGDRGQI

SEQ ID NO: 126049 - protein, 10 aa, synthetic construct
DATRGDRGQI

SEQ ID NO: 126050 - protein, 10 aa, synthetic construct
DAYRGDRGQI

SEQ ID NO: 126051 - protein, 10 aa, synthetic construct
DANRGDRGQI

SEQ ID NO: 126052 - protein, 10 aa, synthetic construct
DAQRGDRGQI

SEQ ID NO: 126053 - protein, 10 aa, synthetic construct
DADRGDRGQI

SEQ ID NO: 126054 - protein, 10 aa, synthetic construct
DAERGDRGQI

SEQ ID NO: 126055 - protein, 10 aa, synthetic construct
DVGRGDRGQI

SEQ ID NO: 126056 - protein, 10 aa, synthetic construct
DVARGDRGQI

SEQ ID NO: 126057 - protein, 10 aa, synthetic construct
DVVRGDRGQI

SEQ ID NO: 126058 - protein, 10 aa, synthetic construct
DVPRGDRGQI

SEQ ID NO: 126059 - protein, 10 aa, synthetic construct
DVLRGDRGQI

SEQ ID NO: 126060 - protein, 10 aa, synthetic construct
DVIRGDRGQI

SEQ ID NO: 126061 - protein, 10 aa, synthetic construct
DVMRGDRGQI

SEQ ID NO: 126062 - protein, 10 aa, synthetic construct
DVWRGDRGQI

SEQ ID NO: 126063 - protein, 10 aa, synthetic construct
DVFRGDRGQI

SEQ ID NO: 126064 - protein, 10 aa, synthetic construct
DVKRGDRGQI

SEQ ID NO: 126065 - protein, 10 aa, synthetic construct
DVRRGDRGQI

SEQ ID NO: 126066 - protein, 10 aa, synthetic construct
DVHRGDRGQI

SEQ ID NO: 126067 - protein, 10 aa, synthetic construct
DVSRGDRGQI

SEQ ID NO: 126068 - protein, 10 aa, synthetic construct
DVTRGDRGQI

SEQ ID NO: 126069 - protein, 10 aa, synthetic construct
DVYRGDRGQI

SEQ ID NO: 126070 - protein, 10 aa, synthetic construct
DVNRGDRGQI

SEQ ID NO: 126071 - protein, 10 aa, synthetic construct
DVQRGDRGQI

SEQ ID NO: 126072 - protein, 10 aa, synthetic construct
DVDRGDRGQI

SEQ ID NO: 126073 - protein, 10 aa, synthetic construct
DVERGDRGQI

SEQ ID NO: 126074 - protein, 10 aa, synthetic construct
DPGRGDRGQI

SEQ ID NO: 126075 - protein, 10 aa, synthetic construct
DPARGDRGQI

SEQ ID NO: 126076 - protein, 10 aa, synthetic construct
DPVRGDRGQI

SEQ ID NO: 126077 - protein, 10 aa, synthetic construct
DPPRGDRGQI

SEQ ID NO: 126078 - protein, 10 aa, synthetic construct
DPLRGDRGQI

SEQ ID NO: 126079 - protein, 10 aa, synthetic construct
DPIRGDRGQI

SEQ ID NO: 126080 - protein, 10 aa, synthetic construct
DPMRGDRGQI

SEQ ID NO: 126081 - protein, 10 aa, synthetic construct
DPWRGDRGQI

SEQ ID NO: 126082 - protein, 10 aa, synthetic construct
DPFRGDRGQI

SEQ ID NO: 126083 - protein, 10 aa, synthetic construct
DPKRGDRGQI

SEQ ID NO: 126084 - protein, 10 aa, synthetic construct
DPRRGDRGQI

SEQ ID NO: 126085 - protein, 10 aa, synthetic construct
DPHRGDRGQI

SEQ ID NO: 126086 - protein, 10 aa, synthetic construct
DPSRGDRGQI

SEQ ID NO: 126087 - protein, 10 aa, synthetic construct
DPTRGDRGQI

SEQ ID NO: 126088 - protein, 10 aa, synthetic construct
DPYRGDRGQI

SEQ ID NO: 126089 - protein, 10 aa, synthetic construct
DPNRGDRGQI

SEQ ID NO: 126090 - protein, 10 aa, synthetic construct
DPQRGDRGQI

SEQ ID NO: 126091 - protein, 10 aa, synthetic construct
DPDRGDRGQI

SEQ ID NO: 126092 - protein, 10 aa, synthetic construct
DPERGDRGQI

SEQ ID NO: 126093 - protein, 10 aa, synthetic construct
DLGRGDRGQI

SEQ ID NO: 126094 - protein, 10 aa, synthetic construct
DLARGDRGQI

SEQ ID NO: 126095 - protein, 10 aa, synthetic construct
DLVRGDRGQI

SEQ ID NO: 126096 - protein, 10 aa, synthetic construct
DLPRGDRGQI

SEQ ID NO: 126097 - protein, 10 aa, synthetic construct
DLLRGDRGQI

SEQ ID NO: 126098 - protein, 10 aa, synthetic construct
DLIRGDRGQI

SEQ ID NO: 126099 - protein, 10 aa, synthetic construct
DLMRGDRGQI

SEQ ID NO: 126100 - protein, 10 aa, synthetic construct
DLWRGDRGQI

SEQ ID NO: 126101 - protein, 10 aa, synthetic construct
DLFRGDRGQI

SEQ ID NO: 126102 - protein, 10 aa, synthetic construct
DLKRGDRGQI

SEQ ID NO: 126103 - protein, 10 aa, synthetic construct
DLRRGDRGQI

SEQ ID NO: 126104 - protein, 10 aa, synthetic construct
DLHRGDRGQI

SEQ ID NO: 126105 - protein, 10 aa, synthetic construct
DLSRGDRGQI

SEQ ID NO: 126106 - protein, 10 aa, synthetic construct
DLTRGDRGQI

SEQ ID NO: 126107 - protein, 10 aa, synthetic construct
DLYRGDRGQI

SEQ ID NO: 126108 - protein, 10 aa, synthetic construct
DLNRGDRGQI

SEQ ID NO: 126109 - protein, 10 aa, synthetic construct
DLQRGDRGQI

SEQ ID NO: 126110 - protein, 10 aa, synthetic construct
DLDRGDRGQI

SEQ ID NO: 126111 - protein, 10 aa, synthetic construct
DLERGDRGQI

SEQ ID NO: 126112 - protein, 10 aa, synthetic construct
DIGRGDRGQI

SEQ ID NO: 126113 - protein, 10 aa, synthetic construct
DIARGDRGQI

SEQ ID NO: 126114 - protein, 10 aa, synthetic construct
DIVRGDRGQI

SEQ ID NO: 126115 - protein, 10 aa, synthetic construct
DIPRGDRGQI

SEQ ID NO: 126116 - protein, 10 aa, synthetic construct
DILRGDRGQI

SEQ ID NO: 126117 - protein, 10 aa, synthetic construct
DIIRGDRGQI

SEQ ID NO: 126118 - protein, 10 aa, synthetic construct
DIMRGDRGQI

SEQ ID NO: 126119 - protein, 10 aa, synthetic construct
DIWRGDRGQI

SEQ ID NO: 126120 - protein, 10 aa, synthetic construct
DIFRGDRGQI

SEQ ID NO: 126121 - protein, 10 aa, synthetic construct
DIKRGDRGQI

SEQ ID NO: 126122 - protein, 10 aa, synthetic construct
DIRRGDRGQI

SEQ ID NO: 126123 - protein, 10 aa, synthetic construct
DIHRGDRGQI

SEQ ID NO: 126124 - protein, 10 aa, synthetic construct
DISRGDRGQI

SEQ ID NO: 126125 - protein, 10 aa, synthetic construct
DITRGDRGQI

SEQ ID NO: 126126 - protein, 10 aa, synthetic construct
DIYRGDRGQI

SEQ ID NO: 126127 - protein, 10 aa, synthetic construct
DINRGDRGQI

SEQ ID NO: 126128 - protein, 10 aa, synthetic construct
DIQRGDRGQI

SEQ ID NO: 126129 - protein, 10 aa, synthetic construct
DIDRGDRGQI

SEQ ID NO: 126130 - protein, 10 aa, synthetic construct
DIERGDRGQI

SEQ ID NO: 126131 - protein, 10 aa, synthetic construct
DMGRGDRGQI

SEQ ID NO: 126132 - protein, 10 aa, synthetic construct
DMARGDRGQI

SEQ ID NO: 126133 - protein, 10 aa, synthetic construct
DMVRGDRGQI

SEQ ID NO: 126134 - protein, 10 aa, synthetic construct
DMPRGDRGQI

SEQ ID NO: 126135 - protein, 10 aa, synthetic construct
DMLRGDRGQI

SEQ ID NO: 126136 - protein, 10 aa, synthetic construct
DMIRGDRGQI

SEQ ID NO: 126137 - protein, 10 aa, synthetic construct
DMMRGDRGQI

SEQ ID NO: 126138 - protein, 10 aa, synthetic construct
DMWRGDRGQI

SEQ ID NO: 126139 - protein, 10 aa, synthetic construct
DMFRGDRGQI

SEQ ID NO: 126140 - protein, 10 aa, synthetic construct
DMKRGDRGQI

SEQ ID NO: 126141 - protein, 10 aa, synthetic construct
DMRRGDRGQI

SEQ ID NO: 126142 - protein, 10 aa, synthetic construct
DMHRGDRGQI

SEQ ID NO: 126143 - protein, 10 aa, synthetic construct
DMSRGDRGQI

SEQ ID NO: 126144 - protein, 10 aa, synthetic construct
DMTRGDRGQI

SEQ ID NO: 126145 - protein, 10 aa, synthetic construct
DMYRGDRGQI

SEQ ID NO: 126146 - protein, 10 aa, synthetic construct
DMNRGDRGQI

SEQ ID NO: 126147 - protein, 10 aa, synthetic construct
DMQRGDRGQI

SEQ ID NO: 126148 - protein, 10 aa, synthetic construct
DMDRGDRGQI

SEQ ID NO: 126149 - protein, 10 aa, synthetic construct
DMERGDRGQI

SEQ ID NO: 126150 - protein, 10 aa, synthetic construct
DWGRGDRGQI

SEQ ID NO: 126151 - protein, 10 aa, synthetic construct
DWARGDRGQI

SEQ ID NO: 126152 - protein, 10 aa, synthetic construct
DWVRGDRGQI

SEQ ID NO: 126153 - protein, 10 aa, synthetic construct
DWPRGDRGQI

SEQ ID NO: 126154 - protein, 10 aa, synthetic construct
DWLRGDRGQI

SEQ ID NO: 126155 - protein, 10 aa, synthetic construct
DWIRGDRGQI

SEQ ID NO: 126156 - protein, 10 aa, synthetic construct
DWMRGDRGQI

SEQ ID NO: 126157 - protein, 10 aa, synthetic construct
DWWRGDRGQI

SEQ ID NO: 126158 - protein, 10 aa, synthetic construct
DWFRGDRGQI

SEQ ID NO: 126159 - protein, 10 aa, synthetic construct
DWKRGDRGQI

SEQ ID NO: 126160 - protein, 10 aa, synthetic construct
DWRRGDRGQI

SEQ ID NO: 126161 - protein, 10 aa, synthetic construct
DWHRGDRGQI

SEQ ID NO: 126162 - protein, 10 aa, synthetic construct
DWSRGDRGQI

SEQ ID NO: 126163 - protein, 10 aa, synthetic construct
DWTRGDRGQI

SEQ ID NO: 126164 - protein, 10 aa, synthetic construct
DWYRGDRGQI

SEQ ID NO: 126165 - protein, 10 aa, synthetic construct
DWNRGDRGQI

SEQ ID NO: 126166 - protein, 10 aa, synthetic construct
DWQRGDRGQI

SEQ ID NO: 126167 - protein, 10 aa, synthetic construct
DWDRGDRGQI

SEQ ID NO: 126168 - protein, 10 aa, synthetic construct
DWERGDRGQI

SEQ ID NO: 126169 - protein, 10 aa, synthetic construct
DFGRGDRGQI

SEQ ID NO: 126170 - protein, 10 aa, synthetic construct
DFARGDRGQI

SEQ ID NO: 126171 - protein, 10 aa, synthetic construct
DFVRGDRGQI

SEQ ID NO: 126172 - protein, 10 aa, synthetic construct
DFPRGDRGQI

SEQ ID NO: 126173 - protein, 10 aa, synthetic construct
DFLRGDRGQI

SEQ ID NO: 126174 - protein, 10 aa, synthetic construct
DFIRGDRGQI

SEQ ID NO: 126175 - protein, 10 aa, synthetic construct
DFMRGDRGQI

SEQ ID NO: 126176 - protein, 10 aa, synthetic construct
DFWRGDRGQI

SEQ ID NO: 126177 - protein, 10 aa, synthetic construct
DFFRGDRGQI

SEQ ID NO: 126178 - protein, 10 aa, synthetic construct
DFKRGDRGQI

SEQ ID NO: 126179 - protein, 10 aa, synthetic construct
DFRRGDRGQI

SEQ ID NO: 126180 - protein, 10 aa, synthetic construct
DFHRGDRGQI

SEQ ID NO: 126181 - protein, 10 aa, synthetic construct
DFSRGDRGQI

SEQ ID NO: 126182 - protein, 10 aa, synthetic construct
DFTRGDRGQI

SEQ ID NO: 126183 - protein, 10 aa, synthetic construct
DFYRGDRGQI

SEQ ID NO: 126184 - protein, 10 aa, synthetic construct
DFNRGDRGQI

SEQ ID NO: 126185 - protein, 10 aa, synthetic construct
DFQRGDRGQI

SEQ ID NO: 126186 - protein, 10 aa, synthetic construct
DFDRGDRGQI

SEQ ID NO: 126187 - protein, 10 aa, synthetic construct
DFERGDRGQI

SEQ ID NO: 126188 - protein, 10 aa, synthetic construct
DKGRGDRGQI

SEQ ID NO: 126189 - protein, 10 aa, synthetic construct
DKARGDRGQI

SEQ ID NO: 126190 - protein, 10 aa, synthetic construct
DKVRGDRGQI

SEQ ID NO: 126191 - protein, 10 aa, synthetic construct
DKPRGDRGQI

SEQ ID NO: 126192 - protein, 10 aa, synthetic construct
DKLRGDRGQI

SEQ ID NO: 126193 - protein, 10 aa, synthetic construct
DKIRGDRGQI

SEQ ID NO: 126194 - protein, 10 aa, synthetic construct
DKMRGDRGQI

SEQ ID NO: 126195 - protein, 10 aa, synthetic construct
DKWRGDRGQI

SEQ ID NO: 126196 - protein, 10 aa, synthetic construct
DKFRGDRGQI

SEQ ID NO: 126197 - protein, 10 aa, synthetic construct
DKKRGDRGQI

SEQ ID NO: 126198 - protein, 10 aa, synthetic construct
DKRRGDRGQI

SEQ ID NO: 126199 - protein, 10 aa, synthetic construct
DKHRGDRGQI

SEQ ID NO: 126200 - protein, 10 aa, synthetic construct
DKSRGDRGQI

SEQ ID NO: 126201 - protein, 10 aa, synthetic construct
DKTRGDRGQI

SEQ ID NO: 126202 - protein, 10 aa, synthetic construct
DKYRGDRGQI

SEQ ID NO: 126203 - protein, 10 aa, synthetic construct
DKNRGDRGQI

SEQ ID NO: 126204 - protein, 10 aa, synthetic construct
DKQRGDRGQI

SEQ ID NO: 126205 - protein, 10 aa, synthetic construct
DKDRGDRGQI

SEQ ID NO: 126206 - protein, 10 aa, synthetic construct
DKERGDRGQI

SEQ ID NO: 126207 - protein, 10 aa, synthetic construct
DRGRGDRGQI

SEQ ID NO: 126208 - protein, 10 aa, synthetic construct
DRARGDRGQI

SEQ ID NO: 126209 - protein, 10 aa, synthetic construct
DRVRGDRGQI

SEQ ID NO: 126210 - protein, 10 aa, synthetic construct
DRPRGDRGQI

SEQ ID NO: 126211 - protein, 10 aa, synthetic construct
DRLRGDRGQI

SEQ ID NO: 126212 - protein, 10 aa, synthetic construct
DRIRGDRGQI

SEQ ID NO: 126213 - protein, 10 aa, synthetic construct
DRMRGDRGQI

SEQ ID NO: 126214 - protein, 10 aa, synthetic construct
DRWRGDRGQI

SEQ ID NO: 126215 - protein, 10 aa, synthetic construct
DRFRGDRGQI

SEQ ID NO: 126216 - protein, 10 aa, synthetic construct
DRKRGDRGQI

SEQ ID NO: 126217 - protein, 10 aa, synthetic construct
DRRRGDRGQI

SEQ ID NO: 126218 - protein, 10 aa, synthetic construct
DRHRGDRGQI

SEQ ID NO: 126219 - protein, 10 aa, synthetic construct
DRSRGDRGQI

SEQ ID NO: 126220 - protein, 10 aa, synthetic construct
DRTRGDRGQI

SEQ ID NO: 126221 - protein, 10 aa, synthetic construct
DRYRGDRGQI

SEQ ID NO: 126222 - protein, 10 aa, synthetic construct
DRNRGDRGQI

SEQ ID NO: 126223 - protein, 10 aa, synthetic construct
DRQRGDRGQI

SEQ ID NO: 126224 - protein, 10 aa, synthetic construct
DRDRGDRGQI

SEQ ID NO: 126225 - protein, 10 aa, synthetic construct
DRERGDRGQI

SEQ ID NO: 126226 - protein, 10 aa, synthetic construct
DHGRGDRGQI

SEQ ID NO: 126227 - protein, 10 aa, synthetic construct
DHARGDRGQI

SEQ ID NO: 126228 - protein, 10 aa, synthetic construct
DHVRGDRGQI

SEQ ID NO: 126229 - protein, 10 aa, synthetic construct
DHPRGDRGQI

SEQ ID NO: 126230 - protein, 10 aa, synthetic construct
DHLRGDRGQI

SEQ ID NO: 126231 - protein, 10 aa, synthetic construct
DHIRGDRGQI

SEQ ID NO: 126232 - protein, 10 aa, synthetic construct
DHMRGDRGQI

SEQ ID NO: 126233 - protein, 10 aa, synthetic construct
DHWRGDRGQI

SEQ ID NO: 126234 - protein, 10 aa, synthetic construct
DHFRGDRGQI

SEQ ID NO: 126235 - protein, 10 aa, synthetic construct
DHKRGDRGQI

SEQ ID NO: 126236 - protein, 10 aa, synthetic construct
DHRRGDRGQI

SEQ ID NO: 126237 - protein, 10 aa, synthetic construct
DHHRGDRGQI

SEQ ID NO: 126238 - protein, 10 aa, synthetic construct
DHSRGDRGQI

SEQ ID NO: 126239 - protein, 10 aa, synthetic construct
DHTRGDRGQI

SEQ ID NO: 126240 - protein, 10 aa, synthetic construct
DHYRGDRGQI

SEQ ID NO: 126241 - protein, 10 aa, synthetic construct
DHNRGDRGQI

SEQ ID NO: 126242 - protein, 10 aa, synthetic construct
DHQRGDRGQI

SEQ ID NO: 126243 - protein, 10 aa, synthetic construct
DHDRGDRGQI

SEQ ID NO: 126244 - protein, 10 aa, synthetic construct
DHERGDRGQI

SEQ ID NO: 126245 - protein, 10 aa, synthetic construct
DSGRGDRGQI

SEQ ID NO: 126246 - protein, 10 aa, synthetic construct
DSARGDRGQI

SEQ ID NO: 126247 - protein, 10 aa, synthetic construct
DSVRGDRGQI

SEQ ID NO: 126248 - protein, 10 aa, synthetic construct
DSPRGDRGQI

SEQ ID NO: 126249 - protein, 10 aa, synthetic construct
DSLRGDRGQI

SEQ ID NO: 126250 - protein, 10 aa, synthetic construct
DSIRGDRGQI

SEQ ID NO: 126251 - protein, 10 aa, synthetic construct
DSMRGDRGQI

SEQ ID NO: 126252 - protein, 10 aa, synthetic construct
DSWRGDRGQI

SEQ ID NO: 126253 - protein, 10 aa, synthetic construct
DSFRGDRGQI

SEQ ID NO: 126254 - protein, 10 aa, synthetic construct
DSKRGDRGQI

SEQ ID NO: 126255 - protein, 10 aa, synthetic construct
DSRRGDRGQI

SEQ ID NO: 126256 - protein, 10 aa, synthetic construct
DSHRGDRGQI

SEQ ID NO: 126257 - protein, 10 aa, synthetic construct
DSSRGDRGQI

SEQ ID NO: 126258 - protein, 10 aa, synthetic construct
DSTRGDRGQI

SEQ ID NO: 126259 - protein, 10 aa, synthetic construct
DSYRGDRGQI

SEQ ID NO: 126260 - protein, 10 aa, synthetic construct
DSNRGDRGQI

SEQ ID NO: 126261 - protein, 10 aa, synthetic construct
DSQRGDRGQI

SEQ ID NO: 126262 - protein, 10 aa, synthetic construct
DSDRGDRGQI

SEQ ID NO: 126263 - protein, 10 aa, synthetic construct
DSERGDRGQI

SEQ ID NO: 126264 - protein, 10 aa, synthetic construct
DTGRGDRGQI

SEQ ID NO: 126265 - protein, 10 aa, synthetic construct
DTARGDRGQI

SEQ ID NO: 126266 - protein, 10 aa, synthetic construct
DTVRGDRGQI

SEQ ID NO: 126267 - protein, 10 aa, synthetic construct
DTPRGDRGQI

SEQ ID NO: 126268 - protein, 10 aa, synthetic construct
DTLRGDRGQI

SEQ ID NO: 126269 - protein, 10 aa, synthetic construct
DTIRGDRGQI

SEQ ID NO: 126270 - protein, 10 aa, synthetic construct
DTMRGDRGQI

SEQ ID NO: 126271 - protein, 10 aa, synthetic construct
DTWRGDRGQI

SEQ ID NO: 126272 - protein, 10 aa, synthetic construct
DTFRGDRGQI

SEQ ID NO: 126273 - protein, 10 aa, synthetic construct
DTKRGDRGQI

SEQ ID NO: 126274 - protein, 10 aa, synthetic construct
DTRRGDRGQI

SEQ ID NO: 126275 - protein, 10 aa, synthetic construct
DTHRGDRGQI

SEQ ID NO: 126276 - protein, 10 aa, synthetic construct
DTSRGDRGQI

SEQ ID NO: 126277 - protein, 10 aa, synthetic construct
DTTRGDRGQI

SEQ ID NO: 126278 - protein, 10 aa, synthetic construct
DTYRGDRGQI

SEQ ID NO: 126279 - protein, 10 aa, synthetic construct
DTNRGDRGQI

SEQ ID NO: 126280 - protein, 10 aa, synthetic construct
DTQRGDRGQI

SEQ ID NO: 126281 - protein, 10 aa, synthetic construct
DTDRGDRGQI

SEQ ID NO: 126282 - protein, 10 aa, synthetic construct
DTERGDRGQI

SEQ ID NO: 126283 - protein, 10 aa, synthetic construct
DYGRGDRGQI

SEQ ID NO: 126284 - protein, 10 aa, synthetic construct
DYARGDRGQI

SEQ ID NO: 126285 - protein, 10 aa, synthetic construct
DYVRGDRGQI

SEQ ID NO: 126286 - protein, 10 aa, synthetic construct
DYPRGDRGQI

SEQ ID NO: 126287 - protein, 10 aa, synthetic construct
DYLRGDRGQI

SEQ ID NO: 126288 - protein, 10 aa, synthetic construct
DYIRGDRGQI

SEQ ID NO: 126289 - protein, 10 aa, synthetic construct
DYMRGDRGQI

SEQ ID NO: 126290 - protein, 10 aa, synthetic construct
DYWRGDRGQI

SEQ ID NO: 126291 - protein, 10 aa, synthetic construct
DYFRGDRGQI

SEQ ID NO: 126292 - protein, 10 aa, synthetic construct
DYKRGDRGQI

SEQ ID NO: 126293 - protein, 10 aa, synthetic construct
DYRRGDRGQI

SEQ ID NO: 126294 - protein, 10 aa, synthetic construct
DYHRGDRGQI

SEQ ID NO: 126295 - protein, 10 aa, synthetic construct
DYSRGDRGQI

SEQ ID NO: 126296 - protein, 10 aa, synthetic construct
DYTRGDRGQI

SEQ ID NO: 126297 - protein, 10 aa, synthetic construct
DYYRGDRGQI

SEQ ID NO: 126298 - protein, 10 aa, synthetic construct
DYNRGDRGQI

SEQ ID NO: 126299 - protein, 10 aa, synthetic construct
DYQRGDRGQI

SEQ ID NO: 126300 - protein, 10 aa, synthetic construct
DYDRGDRGQI

SEQ ID NO: 126301 - protein, 10 aa, synthetic construct
DYERGDRGQI

SEQ ID NO: 126302 - protein, 10 aa, synthetic construct
DNGRGDRGQI

SEQ ID NO: 126303 - protein, 10 aa, synthetic construct
DNARGDRGQI

SEQ ID NO: 126304 - protein, 10 aa, synthetic construct
DNVRGDRGQI

SEQ ID NO: 126305 - protein, 10 aa, synthetic construct
DNPRGDRGQI

SEQ ID NO: 126306 - protein, 10 aa, synthetic construct
DNLRGDRGQI

SEQ ID NO: 126307 - protein, 10 aa, synthetic construct
DNIRGDRGQI

SEQ ID NO: 126308 - protein, 10 aa, synthetic construct
DNMRGDRGQI

SEQ ID NO: 126309 - protein, 10 aa, synthetic construct
DNWRGDRGQI

SEQ ID NO: 126310 - protein, 10 aa, synthetic construct
DNFRGDRGQI

SEQ ID NO: 126311 - protein, 10 aa, synthetic construct
DNKRGDRGQI

SEQ ID NO: 126312 - protein, 10 aa, synthetic construct
DNRRGDRGQI

SEQ ID NO: 126313 - protein, 10 aa, synthetic construct
DNHRGDRGQI

SEQ ID NO: 126314 - protein, 10 aa, synthetic construct
DNSRGDRGQI

SEQ ID NO: 126315 - protein, 10 aa, synthetic construct
DNTRGDRGQI

SEQ ID NO: 126316 - protein, 10 aa, synthetic construct
DNYRGDRGQI

SEQ ID NO: 126317 - protein, 10 aa, synthetic construct
DNNRGDRGQI

SEQ ID NO: 126318 - protein, 10 aa, synthetic construct
DNQRGDRGQI

SEQ ID NO: 126319 - protein, 10 aa, synthetic construct
DNDRGDRGQI

SEQ ID NO: 126320 - protein, 10 aa, synthetic construct
DNERGDRGQI

SEQ ID NO: 126321 - protein, 10 aa, synthetic construct
DQGRGDRGQI

SEQ ID NO: 126322 - protein, 10 aa, synthetic construct
DQARGDRGQI

SEQ ID NO: 126323 - protein, 10 aa, synthetic construct
DQVRGDRGQI

SEQ ID NO: 126324 - protein, 10 aa, synthetic construct
DQPRGDRGQI

SEQ ID NO: 126325 - protein, 10 aa, synthetic construct
DQLRGDRGQI

SEQ ID NO: 126326 - protein, 10 aa, synthetic construct
DQIRGDRGQI

SEQ ID NO: 126327 - protein, 10 aa, synthetic construct
DQMRGDRGQI

SEQ ID NO: 126328 - protein, 10 aa, synthetic construct
DQWRGDRGQI

SEQ ID NO: 126329 - protein, 10 aa, synthetic construct
DQFRGDRGQI

SEQ ID NO: 126330 - protein, 10 aa, synthetic construct
DQKRGDRGQI

SEQ ID NO: 126331 - protein, 10 aa, synthetic construct
DQRRGDRGQI

SEQ ID NO: 126332 - protein, 10 aa, synthetic construct
DQHRGDRGQI

SEQ ID NO: 126333 - protein, 10 aa, synthetic construct
DQSRGDRGQI

SEQ ID NO: 126334 - protein, 10 aa, synthetic construct
DQTRGDRGQI

SEQ ID NO: 126335 - protein, 10 aa, synthetic construct
DQYRGDRGQI

SEQ ID NO: 126336 - protein, 10 aa, synthetic construct
DQNRGDRGQI

SEQ ID NO: 126337 - protein, 10 aa, synthetic construct
DQQRGDRGQI

SEQ ID NO: 126338 - protein, 10 aa, synthetic construct
DQDRGDRGQI

SEQ ID NO: 126339 - protein, 10 aa, synthetic construct
DQERGDRGQI

SEQ ID NO: 126340 - protein, 10 aa, synthetic construct
DDGRGDRGQI

SEQ ID NO: 126341 - protein, 10 aa, synthetic construct
DDARGDRGQI

SEQ ID NO: 126342 - protein, 10 aa, synthetic construct
DDVRGDRGQI

SEQ ID NO: 126343 - protein, 10 aa, synthetic construct
DDPRGDRGQI

SEQ ID NO: 126344 - protein, 10 aa, synthetic construct
DDLRGDRGQI

SEQ ID NO: 126345 - protein, 10 aa, synthetic construct
DDIRGDRGQI

SEQ ID NO: 126346 - protein, 10 aa, synthetic construct
DDMRGDRGQI

SEQ ID NO: 126347 - protein, 10 aa, synthetic construct
DDWRGDRGQI

SEQ ID NO: 126348 - protein, 10 aa, synthetic construct
DDFRGDRGQI

SEQ ID NO: 126349 - protein, 10 aa, synthetic construct
DDKRGDRGQI

SEQ ID NO: 126350 - protein, 10 aa, synthetic construct
DDRRGDRGQI

SEQ ID NO: 126351 - protein, 10 aa, synthetic construct
DDHRGDRGQI

SEQ ID NO: 126352 - protein, 10 aa, synthetic construct
DDSRGDRGQI

SEQ ID NO: 126353 - protein, 10 aa, synthetic construct
DDTRGDRGQI

SEQ ID NO: 126354 - protein, 10 aa, synthetic construct
DDYRGDRGQI

SEQ ID NO: 126355 - protein, 10 aa, synthetic construct
DDNRGDRGQI

SEQ ID NO: 126356 - protein, 10 aa, synthetic construct
DDQRGDRGQI

SEQ ID NO: 126357 - protein, 10 aa, synthetic construct
DDDRGDRGQI

SEQ ID NO: 126358 - protein, 10 aa, synthetic construct
DDERGDRGQI

SEQ ID NO: 126359 - protein, 10 aa, synthetic construct
DEGRGDRGQI

SEQ ID NO: 126360 - protein, 10 aa, synthetic construct
DEARGDRGQI

SEQ ID NO: 126361 - protein, 10 aa, synthetic construct
DEVRGDRGQI

SEQ ID NO: 126362 - protein, 10 aa, synthetic construct
DEPRGDRGQI

SEQ ID NO: 126363 - protein, 10 aa, synthetic construct
DELRGDRGQI

SEQ ID NO: 126364 - protein, 10 aa, synthetic construct
DEIRGDRGQI

SEQ ID NO: 126365 - protein, 10 aa, synthetic construct
DEMRGDRGQI

SEQ ID NO: 126366 - protein, 10 aa, synthetic construct
DEWRGDRGQI

SEQ ID NO: 126367 - protein, 10 aa, synthetic construct
DEFRGDRGQI

SEQ ID NO: 126368 - protein, 10 aa, synthetic construct
DEKRGDRGQI

SEQ ID NO: 126369 - protein, 10 aa, synthetic construct
DERRGDRGQI

SEQ ID NO: 126370 - protein, 10 aa, synthetic construct
DEHRGDRGQI

SEQ ID NO: 126371 - protein, 10 aa, synthetic construct
DESRGDRGQI

SEQ ID NO: 126372 - protein, 10 aa, synthetic construct
DETRGDRGQI

SEQ ID NO: 126373 - protein, 10 aa, synthetic construct
DEYRGDRGQI

SEQ ID NO: 126374 - protein, 10 aa, synthetic construct
DENRGDRGQI

SEQ ID NO: 126375 - protein, 10 aa, synthetic construct
DEQRGDRGQI

SEQ ID NO: 126376 - protein, 10 aa, synthetic construct
DEDRGDRGQI

SEQ ID NO: 126377 - protein, 10 aa, synthetic construct
DEERGDRGQI

SEQ ID NO: 126378 - protein, 10 aa, synthetic construct
QGGRGDRGQI

SEQ ID NO: 126379 - protein, 10 aa, synthetic construct
QGARGDRGQI

SEQ ID NO: 126380 - protein, 10 aa, synthetic construct
QGVRGDRGQI

SEQ ID NO: 126381 - protein, 10 aa, synthetic construct
QGPRGDRGQI

SEQ ID NO: 126382 - protein, 10 aa, synthetic construct
QGLRGDRGQI

SEQ ID NO: 126383 - protein, 10 aa, synthetic construct
QGIRGDRGQI

SEQ ID NO: 126384 - protein, 10 aa, synthetic construct
QGMRGDRGQI

SEQ ID NO: 126385 - protein, 10 aa, synthetic construct
QGWRGDRGQI

SEQ ID NO: 126386 - protein, 10 aa, synthetic construct
QGFRGDRGQI

SEQ ID NO: 126387 - protein, 10 aa, synthetic construct
QGKRGDRGQI

SEQ ID NO: 126388 - protein, 10 aa, synthetic construct
QGRRGDRGQI

SEQ ID NO: 126389 - protein, 10 aa, synthetic construct
QGHRGDRGQI

SEQ ID NO: 126390 - protein, 10 aa, synthetic construct
QGSRGDRGQI

SEQ ID NO: 126391 - protein, 10 aa, synthetic construct
QGTRGDRGQI

SEQ ID NO: 126392 - protein, 10 aa, synthetic construct
QGYRGDRGQI

SEQ ID NO: 126393 - protein, 10 aa, synthetic construct
QGNRGDRGQI

SEQ ID NO: 126394 - protein, 10 aa, synthetic construct
QGQRGDRGQI

SEQ ID NO: 126395 - protein, 10 aa, synthetic construct
QGDRGDRGQI

SEQ ID NO: 126396 - protein, 10 aa, synthetic construct
QGERGDRGQI

SEQ ID NO: 126397 - protein, 10 aa, synthetic construct
QAGRGDRGQI

SEQ ID NO: 126398 - protein, 10 aa, synthetic construct
QAARGDRGQI

SEQ ID NO: 126399 - protein, 10 aa, synthetic construct
QAVRGDRGQI

SEQ ID NO: 126400 - protein, 10 aa, synthetic construct
QAPRGDRGQI

SEQ ID NO: 126401 - protein, 10 aa, synthetic construct
QALRGDRGQI

SEQ ID NO: 126402 - protein, 10 aa, synthetic construct
QAIRGDRGQI

SEQ ID NO: 126403 - protein, 10 aa, synthetic construct
QAMRGDRGQI

SEQ ID NO: 126404 - protein, 10 aa, synthetic construct
QAWRGDRGQI

SEQ ID NO: 126405 - protein, 10 aa, synthetic construct
QAFRGDRGQI

SEQ ID NO: 126406 - protein, 10 aa, synthetic construct
QAKRGDRGQI

SEQ ID NO: 126407 - protein, 10 aa, synthetic construct
QARRGDRGQI

SEQ ID NO: 126408 - protein, 10 aa, synthetic construct
QAHRGDRGQI

SEQ ID NO: 126409 - protein, 10 aa, synthetic construct
QASRGDRGQI

SEQ ID NO: 126410 - protein, 10 aa, synthetic construct
QATRGDRGQI

SEQ ID NO: 126411 - protein, 10 aa, synthetic construct
QAYRGDRGQI

SEQ ID NO: 126412 - protein, 10 aa, synthetic construct
QANRGDRGQI

SEQ ID NO: 126413 - protein, 10 aa, synthetic construct
QAQRGDRGQI

SEQ ID NO: 126414 - protein, 10 aa, synthetic construct
QADRGDRGQI

SEQ ID NO: 126415 - protein, 10 aa, synthetic construct
QAERGDRGQI

SEQ ID NO: 126416 - protein, 10 aa, synthetic construct
QVGRGDRGQI

SEQ ID NO: 126417 - protein, 10 aa, synthetic construct
QVARGDRGQI

SEQ ID NO: 126418 - protein, 10 aa, synthetic construct
QVVRGDRGQI

SEQ ID NO: 126419 - protein, 10 aa, synthetic construct
QVPRGDRGQI

SEQ ID NO: 126420 - protein, 10 aa, synthetic construct
QVLRGDRGQI

SEQ ID NO: 126421 - protein, 10 aa, synthetic construct
QVIRGDRGQI

SEQ ID NO: 126422 - protein, 10 aa, synthetic construct
QVMRGDRGQI

SEQ ID NO: 126423 - protein, 10 aa, synthetic construct
QVWRGDRGQI

SEQ ID NO: 126424 - protein, 10 aa, synthetic construct
QVFRGDRGQI

SEQ ID NO: 126425 - protein, 10 aa, synthetic construct
QVKRGDRGQI

SEQ ID NO: 126426 - protein, 10 aa, synthetic construct
QVRRGDRGQI

SEQ ID NO: 126427 - protein, 10 aa, synthetic construct
QVHRGDRGQI

SEQ ID NO: 126428 - protein, 10 aa, synthetic construct
QVSRGDRGQI

SEQ ID NO: 126429 - protein, 10 aa, synthetic construct
QVTRGDRGQI

SEQ ID NO: 126430 - protein, 10 aa, synthetic construct
QVYRGDRGQI

SEQ ID NO: 126431 - protein, 10 aa, synthetic construct
QVNRGDRGQI

SEQ ID NO: 126432 - protein, 10 aa, synthetic construct
QVQRGDRGQI

SEQ ID NO: 126433 - protein, 10 aa, synthetic construct
QVDRGDRGQI

SEQ ID NO: 126434 - protein, 10 aa, synthetic construct
QVERGDRGQI

SEQ ID NO: 126435 - protein, 10 aa, synthetic construct
QPGRGDRGQI

SEQ ID NO: 126436 - protein, 10 aa, synthetic construct
QPARGDRGQI

SEQ ID NO: 126437 - protein, 10 aa, synthetic construct
QPVRGDRGQI

SEQ ID NO: 126438 - protein, 10 aa, synthetic construct
QPPRGDRGQI

SEQ ID NO: 126439 - protein, 10 aa, synthetic construct
QPLRGDRGQI

SEQ ID NO: 126440 - protein, 10 aa, synthetic construct
QPIRGDRGQI

SEQ ID NO: 126441 - protein, 10 aa, synthetic construct
QPMRGDRGQI

SEQ ID NO: 126442 - protein, 10 aa, synthetic construct
QPWRGDRGQI

SEQ ID NO: 126443 - protein, 10 aa, synthetic construct
QPFRGDRGQI

SEQ ID NO: 126444 - protein, 10 aa, synthetic construct
QPKRGDRGQI

SEQ ID NO: 126445 - protein, 10 aa, synthetic construct
QPRRGDRGQI

SEQ ID NO: 126446 - protein, 10 aa, synthetic construct
QPHRGDRGQI

SEQ ID NO: 126447 - protein, 10 aa, synthetic construct
QPSRGDRGQI

SEQ ID NO: 126448 - protein, 10 aa, synthetic construct
QPTRGDRGQI

SEQ ID NO: 126449 - protein, 10 aa, synthetic construct
QPYRGDRGQI

SEQ ID NO: 126450 - protein, 10 aa, synthetic construct
QPNRGDRGQI

SEQ ID NO: 126451 - protein, 10 aa, synthetic construct
QPQRGDRGQI

SEQ ID NO: 126452 - protein, 10 aa, synthetic construct
QPDRGDRGQI

SEQ ID NO: 126453 - protein, 10 aa, synthetic construct
QPERGDRGQI

SEQ ID NO: 126454 - protein, 10 aa, synthetic construct
QLGRGDRGQI

SEQ ID NO: 126455 - protein, 10 aa, synthetic construct
QLARGDRGQI

SEQ ID NO: 126456 - protein, 10 aa, synthetic construct
QLVRGDRGQI

SEQ ID NO: 126457 - protein, 10 aa, synthetic construct
QLPRGDRGQI

SEQ ID NO: 126458 - protein, 10 aa, synthetic construct
QLLRGDRGQI

SEQ ID NO: 126459 - protein, 10 aa, synthetic construct
QLIRGDRGQI

SEQ ID NO: 126460 - protein, 10 aa, synthetic construct
QLMRGDRGQI

SEQ ID NO: 126461 - protein, 10 aa, synthetic construct
QLWRGDRGQI

SEQ ID NO: 126462 - protein, 10 aa, synthetic construct
QLFRGDRGQI

SEQ ID NO: 126463 - protein, 10 aa, synthetic construct
QLKRGDRGQI

SEQ ID NO: 126464 - protein, 10 aa, synthetic construct
QLRRGDRGQI

SEQ ID NO: 126465 - protein, 10 aa, synthetic construct
QLHRGDRGQI

SEQ ID NO: 126466 - protein, 10 aa, synthetic construct
QLSRGDRGQI

SEQ ID NO: 126467 - protein, 10 aa, synthetic construct
QLTRGDRGQI

SEQ ID NO: 126468 - protein, 10 aa, synthetic construct
QLYRGDRGQI

SEQ ID NO: 126469 - protein, 10 aa, synthetic construct
QLNRGDRGQI

SEQ ID NO: 126470 - protein, 10 aa, synthetic construct
QLQRGDRGQI

SEQ ID NO: 126471 - protein, 10 aa, synthetic construct
QLDRGDRGQI

SEQ ID NO: 126472 - protein, 10 aa, synthetic construct
QLERGDRGQI

SEQ ID NO: 126473 - protein, 10 aa, synthetic construct
QIGRGDRGQI

SEQ ID NO: 126474 - protein, 10 aa, synthetic construct
QIARGDRGQI

SEQ ID NO: 126475 - protein, 10 aa, synthetic construct
QIVRGDRGQI

SEQ ID NO: 126476 - protein, 10 aa, synthetic construct
QIPRGDRGQI

SEQ ID NO: 126477 - protein, 10 aa, synthetic construct
QILRGDRGQI

SEQ ID NO: 126478 - protein, 10 aa, synthetic construct
QIIRGDRGQI

SEQ ID NO: 126479 - protein, 10 aa, synthetic construct
QIMRGDRGQI

SEQ ID NO: 126480 - protein, 10 aa, synthetic construct
QIWRGDRGQI

SEQ ID NO: 126481 - protein, 10 aa, synthetic construct
QIFRGDRGQI

SEQ ID NO: 126482 - protein, 10 aa, synthetic construct
QIKRGDRGQI

SEQ ID NO: 126483 - protein, 10 aa, synthetic construct
QIRRGDRGQI

SEQ ID NO: 126484 - protein, 10 aa, synthetic construct
QIHRGDRGQI

SEQ ID NO: 126485 - protein, 10 aa, synthetic construct
QISRGDRGQI

SEQ ID NO: 126486 - protein, 10 aa, synthetic construct
QITRGDRGQI

SEQ ID NO: 126487 - protein, 10 aa, synthetic construct
QIYRGDRGQI

SEQ ID NO: 126488 - protein, 10 aa, synthetic construct
QINRGDRGQI

SEQ ID NO: 126489 - protein, 10 aa, synthetic construct
QIQRGDRGQI

SEQ ID NO: 126490 - protein, 10 aa, synthetic construct
QIDRGDRGQI

SEQ ID NO: 126491 - protein, 10 aa, synthetic construct
QIERGDRGQI

SEQ ID NO: 126492 - protein, 10 aa, synthetic construct
QMGRGDRGQI

SEQ ID NO: 126493 - protein, 10 aa, synthetic construct
QMARGDRGQI

SEQ ID NO: 126494 - protein, 10 aa, synthetic construct
QMVRGDRGQI

SEQ ID NO: 126495 - protein, 10 aa, synthetic construct
QMPRGDRGQI

SEQ ID NO: 126496 - protein, 10 aa, synthetic construct
QMLRGDRGQI

SEQ ID NO: 126497 - protein, 10 aa, synthetic construct
QMIRGDRGQI

SEQ ID NO: 126498 - protein, 10 aa, synthetic construct
QMMRGDRGQI

SEQ ID NO: 126499 - protein, 10 aa, synthetic construct
QMWRGDRGQI

SEQ ID NO: 126500 - protein, 10 aa, synthetic construct
QMFRGDRGQI

SEQ ID NO: 126501 - protein, 10 aa, synthetic construct
QMKRGDRGQI

SEQ ID NO: 126502 - protein, 10 aa, synthetic construct
QMRRGDRGQI

SEQ ID NO: 126503 - protein, 10 aa, synthetic construct
QMHRGDRGQI

SEQ ID NO: 126504 - protein, 10 aa, synthetic construct
QMSRGDRGQI

SEQ ID NO: 126505 - protein, 10 aa, synthetic construct
QMTRGDRGQI

SEQ ID NO: 126506 - protein, 10 aa, synthetic construct
QMYRGDRGQI

SEQ ID NO: 126507 - protein, 10 aa, synthetic construct
QMNRGDRGQI

SEQ ID NO: 126508 - protein, 10 aa, synthetic construct
QMQRGDRGQI

SEQ ID NO: 126509 - protein, 10 aa, synthetic construct
QMDRGDRGQI

SEQ ID NO: 126510 - protein, 10 aa, synthetic construct
QMERGDRGQI

SEQ ID NO: 126511 - protein, 10 aa, synthetic construct
QWGRGDRGQI

SEQ ID NO: 126512 - protein, 10 aa, synthetic construct
QWARGDRGQI

SEQ ID NO: 126513 - protein, 10 aa, synthetic construct
QWVRGDRGQI

SEQ ID NO: 126514 - protein, 10 aa, synthetic construct
QWPRGDRGQI

SEQ ID NO: 126515 - protein, 10 aa, synthetic construct
QWLRGDRGQI

SEQ ID NO: 126516 - protein, 10 aa, synthetic construct
QWIRGDRGQI

SEQ ID NO: 126517 - protein, 10 aa, synthetic construct
QWMRGDRGQI

SEQ ID NO: 126518 - protein, 10 aa, synthetic construct
QWWRGDRGQI

SEQ ID NO: 126519 - protein, 10 aa, synthetic construct
QWFRGDRGQI

SEQ ID NO: 126520 - protein, 10 aa, synthetic construct
QWKRGDRGQI

SEQ ID NO: 126521 - protein, 10 aa, synthetic construct
QWRRGDRGQI

SEQ ID NO: 126522 - protein, 10 aa, synthetic construct
QWHRGDRGQI

SEQ ID NO: 126523 - protein, 10 aa, synthetic construct
QWSRGDRGQI

SEQ ID NO: 126524 - protein, 10 aa, synthetic construct
QWTRGDRGQI

SEQ ID NO: 126525 - protein, 10 aa, synthetic construct
QWYRGDRGQI

SEQ ID NO: 126526 - protein, 10 aa, synthetic construct
QWNRGDRGQI

SEQ ID NO: 126527 - protein, 10 aa, synthetic construct
QWQRGDRGQI

SEQ ID NO: 126528 - protein, 10 aa, synthetic construct
QWDRGDRGQI

SEQ ID NO: 126529 - protein, 10 aa, synthetic construct
QWERGDRGQI

SEQ ID NO: 126530 - protein, 10 aa, synthetic construct
QFGRGDRGQI

SEQ ID NO: 126531 - protein, 10 aa, synthetic construct
QFARGDRGQI

SEQ ID NO: 126532 - protein, 10 aa, synthetic construct
QFVRGDRGQI

SEQ ID NO: 126533 - protein, 10 aa, synthetic construct
QFPRGDRGQI

SEQ ID NO: 126534 - protein, 10 aa, synthetic construct
QFLRGDRGQI

SEQ ID NO: 126535 - protein, 10 aa, synthetic construct
QFIRGDRGQI

SEQ ID NO: 126536 - protein, 10 aa, synthetic construct
QFMRGDRGQI

SEQ ID NO: 126537 - protein, 10 aa, synthetic construct
QFWRGDRGQI

SEQ ID NO: 126538 - protein, 10 aa, synthetic construct
QFFRGDRGQI

SEQ ID NO: 126539 - protein, 10 aa, synthetic construct
QFKRGDRGQI

SEQ ID NO: 126540 - protein, 10 aa, synthetic construct
QFRRGDRGQI

SEQ ID NO: 126541 - protein, 10 aa, synthetic construct
QFHRGDRGQI

SEQ ID NO: 126542 - protein, 10 aa, synthetic construct
QFSRGDRGQI

SEQ ID NO: 126543 - protein, 10 aa, synthetic construct
QFTRGDRGQI

SEQ ID NO: 126544 - protein, 10 aa, synthetic construct
QFYRGDRGQI

SEQ ID NO: 126545 - protein, 10 aa, synthetic construct
QFNRGDRGQI

SEQ ID NO: 126546 - protein, 10 aa, synthetic construct
QFQRGDRGQI

SEQ ID NO: 126547 - protein, 10 aa, synthetic construct
QFDRGDRGQI

SEQ ID NO: 126548 - protein, 10 aa, synthetic construct
QFERGDRGQI

SEQ ID NO: 126549 - protein, 10 aa, synthetic construct
QKGRGDRGQI

SEQ ID NO: 126550 - protein, 10 aa, synthetic construct
QKARGDRGQI

SEQ ID NO: 126551 - protein, 10 aa, synthetic construct
QKVRGDRGQI

SEQ ID NO: 126552 - protein, 10 aa, synthetic construct
QKPRGDRGQI

SEQ ID NO: 126553 - protein, 10 aa, synthetic construct
QKLRGDRGQI

SEQ ID NO: 126554 - protein, 10 aa, synthetic construct
QKIRGDRGQI

SEQ ID NO: 126555 - protein, 10 aa, synthetic construct
QKMRGDRGQI

SEQ ID NO: 126556 - protein, 10 aa, synthetic construct
QKWRGDRGQI

SEQ ID NO: 126557 - protein, 10 aa, synthetic construct
QKFRGDRGQI

SEQ ID NO: 126558 - protein, 10 aa, synthetic construct
QKKRGDRGQI

SEQ ID NO: 126559 - protein, 10 aa, synthetic construct
QKRRGDRGQI

SEQ ID NO: 126560 - protein, 10 aa, synthetic construct
QKHRGDRGQI

SEQ ID NO: 126561 - protein, 10 aa, synthetic construct
QKSRGDRGQI

SEQ ID NO: 126562 - protein, 10 aa, synthetic construct
QKTRGDRGQI

SEQ ID NO: 126563 - protein, 10 aa, synthetic construct
QKYRGDRGQI

SEQ ID NO: 126564 - protein, 10 aa, synthetic construct
QKNRGDRGQI

SEQ ID NO: 126565 - protein, 10 aa, synthetic construct
QKQRGDRGQI

SEQ ID NO: 126566 - protein, 10 aa, synthetic construct
QKDRGDRGQI

SEQ ID NO: 126567 - protein, 10 aa, synthetic construct
QKERGDRGQI

SEQ ID NO: 126568 - protein, 10 aa, synthetic construct
QRGRGDRGQI

SEQ ID NO: 126569 - protein, 10 aa, synthetic construct
QRARGDRGQI

SEQ ID NO: 126570 - protein, 10 aa, synthetic construct
QRVRGDRGQI

SEQ ID NO: 126571 - protein, 10 aa, synthetic construct
QRPRGDRGQI

SEQ ID NO: 126572 - protein, 10 aa, synthetic construct
QRLRGDRGQI

SEQ ID NO: 126573 - protein, 10 aa, synthetic construct
QRIRGDRGQI

SEQ ID NO: 126574 - protein, 10 aa, synthetic construct
QRMRGDRGQI

SEQ ID NO: 126575 - protein, 10 aa, synthetic construct
QRWRGDRGQI

SEQ ID NO: 126576 - protein, 10 aa, synthetic construct
QRFRGDRGQI

SEQ ID NO: 126577 - protein, 10 aa, synthetic construct
QRKRGDRGQI

SEQ ID NO: 126578 - protein, 10 aa, synthetic construct
QRRRGDRGQI

SEQ ID NO: 126579 - protein, 10 aa, synthetic construct
QRHRGDRGQI

SEQ ID NO: 126580 - protein, 10 aa, synthetic construct
QRSRGDRGQI

SEQ ID NO: 126581 - protein, 10 aa, synthetic construct
QRTRGDRGQI

SEQ ID NO: 126582 - protein, 10 aa, synthetic construct
QRYRGDRGQI

SEQ ID NO: 126583 - protein, 10 aa, synthetic construct
QRNRGDRGQI

SEQ ID NO: 126584 - protein, 10 aa, synthetic construct
QRQRGDRGQI

SEQ ID NO: 126585 - protein, 10 aa, synthetic construct
QRDRGDRGQI

SEQ ID NO: 126586 - protein, 10 aa, synthetic construct
QRERGDRGQI

SEQ ID NO: 126587 - protein, 10 aa, synthetic construct
QHGRGDRGQI

SEQ ID NO: 126588 - protein, 10 aa, synthetic construct
QHARGDRGQI

SEQ ID NO: 126589 - protein, 10 aa, synthetic construct
QHVRGDRGQI

SEQ ID NO: 126590 - protein, 10 aa, synthetic construct
QHPRGDRGQI

SEQ ID NO: 126591 - protein, 10 aa, synthetic construct
QHLRGDRGQI

SEQ ID NO: 126592 - protein, 10 aa, synthetic construct
QHIRGDRGQI

SEQ ID NO: 126593 - protein, 10 aa, synthetic construct
QHMRGDRGQI

SEQ ID NO: 126594 - protein, 10 aa, synthetic construct
QHWRGDRGQI

SEQ ID NO: 126595 - protein, 10 aa, synthetic construct
QHFRGDRGQI

SEQ ID NO: 126596 - protein, 10 aa, synthetic construct
QHKRGDRGQI

SEQ ID NO: 126597 - protein, 10 aa, synthetic construct
QHRRGDRGQI

SEQ ID NO: 126598 - protein, 10 aa, synthetic construct
QHHRGDRGQI

SEQ ID NO: 126599 - protein, 10 aa, synthetic construct
QHSRGDRGQI

SEQ ID NO: 126600 - protein, 10 aa, synthetic construct
QHTRGDRGQI

SEQ ID NO: 126601 - protein, 10 aa, synthetic construct
QHYRGDRGQI

SEQ ID NO: 126602 - protein, 10 aa, synthetic construct
QHNRGDRGQI

SEQ ID NO: 126603 - protein, 10 aa, synthetic construct
QHQRGDRGQI

SEQ ID NO: 126604 - protein, 10 aa, synthetic construct
QHDRGDRGQI

SEQ ID NO: 126605 - protein, 10 aa, synthetic construct
QHERGDRGQI

SEQ ID NO: 126606 - protein, 10 aa, synthetic construct
QSGRGDRGQI

SEQ ID NO: 126607 - protein, 10 aa, synthetic construct
QSARGDRGQI

SEQ ID NO: 126608 - protein, 10 aa, synthetic construct
QSVRGDRGQI

SEQ ID NO: 126609 - protein, 10 aa, synthetic construct
QSPRGDRGQI

SEQ ID NO: 126610 - protein, 10 aa, synthetic construct
QSLRGDRGQI

SEQ ID NO: 126611 - protein, 10 aa, synthetic construct
QSIRGDRGQI

SEQ ID NO: 126612 - protein, 10 aa, synthetic construct
QSMRGDRGQI

SEQ ID NO: 126613 - protein, 10 aa, synthetic construct
QSWRGDRGQI

SEQ ID NO: 126614 - protein, 10 aa, synthetic construct
QSFRGDRGQI

SEQ ID NO: 126615 - protein, 10 aa, synthetic construct
QSKRGDRGQI

SEQ ID NO: 126616 - protein, 10 aa, synthetic construct
QSRRGDRGQI

SEQ ID NO: 126617 - protein, 10 aa, synthetic construct
QSHRGDRGQI

SEQ ID NO: 126618 - protein, 10 aa, synthetic construct
QSSRGDRGQI

SEQ ID NO: 126619 - protein, 10 aa, synthetic construct
QSTRGDRGQI

SEQ ID NO: 126620 - protein, 10 aa, synthetic construct
QSYRGDRGQI

SEQ ID NO: 126621 - protein, 10 aa, synthetic construct
QSNRGDRGQI

SEQ ID NO: 126622 - protein, 10 aa, synthetic construct
QSQRGDRGQI

SEQ ID NO: 126623 - protein, 10 aa, synthetic construct
QSDRGDRGQI

SEQ ID NO: 126624 - protein, 10 aa, synthetic construct
QSERGDRGQI

SEQ ID NO: 126625 - protein, 10 aa, synthetic construct
QTGRGDRGQI

SEQ ID NO: 126626 - protein, 10 aa, synthetic construct
QTARGDRGQI

SEQ ID NO: 126627 - protein, 10 aa, synthetic construct
QTVRGDRGQI

SEQ ID NO: 126628 - protein, 10 aa, synthetic construct
QTPRGDRGQI

SEQ ID NO: 126629 - protein, 10 aa, synthetic construct
QTLRGDRGQI

SEQ ID NO: 126630 - protein, 10 aa, synthetic construct
QTIRGDRGQI

SEQ ID NO: 126631 - protein, 10 aa, synthetic construct
QTMRGDRGQI

SEQ ID NO: 126632 - protein, 10 aa, synthetic construct
QTWRGDRGQI

SEQ ID NO: 126633 - protein, 10 aa, synthetic construct
QTFRGDRGQI

SEQ ID NO: 126634 - protein, 10 aa, synthetic construct
QTKRGDRGQI

SEQ ID NO: 126635 - protein, 10 aa, synthetic construct
QTRRGDRGQI

SEQ ID NO: 126636 - protein, 10 aa, synthetic construct
QTHRGDRGQI

SEQ ID NO: 126637 - protein, 10 aa, synthetic construct
QTSRGDRGQI

SEQ ID NO: 126638 - protein, 10 aa, synthetic construct
QTTRGDRGQI

SEQ ID NO: 126639 - protein, 10 aa, synthetic construct
QTYRGDRGQI

SEQ ID NO: 126640 - protein, 10 aa, synthetic construct
QTNRGDRGQI

SEQ ID NO: 126641 - protein, 10 aa, synthetic construct
QTQRGDRGQI

SEQ ID NO: 126642 - protein, 10 aa, synthetic construct
QTDRGDRGQI

SEQ ID NO: 126643 - protein, 10 aa, synthetic construct
QTERGDRGQI

SEQ ID NO: 126644 - protein, 10 aa, synthetic construct
QYGRGDRGQI

SEQ ID NO: 126645 - protein, 10 aa, synthetic construct
QYARGDRGQI

SEQ ID NO: 126646 - protein, 10 aa, synthetic construct
QYVRGDRGQI

SEQ ID NO: 126647 - protein, 10 aa, synthetic construct
QYPRGDRGQI

SEQ ID NO: 126648 - protein, 10 aa, synthetic construct
QYLRGDRGQI

SEQ ID NO: 126649 - protein, 10 aa, synthetic construct
QYIRGDRGQI

SEQ ID NO: 126650 - protein, 10 aa, synthetic construct
QYMRGDRGQI

SEQ ID NO: 126651 - protein, 10 aa, synthetic construct
QYWRGDRGQI

SEQ ID NO: 126652 - protein, 10 aa, synthetic construct
QYFRGDRGQI

SEQ ID NO: 126653 - protein, 10 aa, synthetic construct
QYKRGDRGQI

SEQ ID NO: 126654 - protein, 10 aa, synthetic construct
QYRRGDRGQI

SEQ ID NO: 126655 - protein, 10 aa, synthetic construct
QYHRGDRGQI

SEQ ID NO: 126656 - protein, 10 aa, synthetic construct
QYSRGDRGQI

SEQ ID NO: 126657 - protein, 10 aa, synthetic construct
QYTRGDRGQI

SEQ ID NO: 126658 - protein, 10 aa, synthetic construct
QYYRGDRGQI

SEQ ID NO: 126659 - protein, 10 aa, synthetic construct
QYNRGDRGQI

SEQ ID NO: 126660 - protein, 10 aa, synthetic construct
QYQRGDRGQI

SEQ ID NO: 126661 - protein, 10 aa, synthetic construct
QYDRGDRGQI

SEQ ID NO: 126662 - protein, 10 aa, synthetic construct
QYERGDRGQI

SEQ ID NO: 126663 - protein, 10 aa, synthetic construct
QNGRGDRGQI

SEQ ID NO: 126664 - protein, 10 aa, synthetic construct
QNARGDRGQI

SEQ ID NO: 126665 - protein, 10 aa, synthetic construct
QNVRGDRGQI

SEQ ID NO: 126666 - protein, 10 aa, synthetic construct
QNPRGDRGQI

SEQ ID NO: 126667 - protein, 10 aa, synthetic construct
QNLRGDRGQI

SEQ ID NO: 126668 - protein, 10 aa, synthetic construct
QNIRGDRGQI

SEQ ID NO: 126669 - protein, 10 aa, synthetic construct
QNMRGDRGQI

SEQ ID NO: 126670 - protein, 10 aa, synthetic construct
QNWRGDRGQI

SEQ ID NO: 126671 - protein, 10 aa, synthetic construct
QNFRGDRGQI

SEQ ID NO: 126672 - protein, 10 aa, synthetic construct
QNKRGDRGQI

SEQ ID NO: 126673 - protein, 10 aa, synthetic construct
QNRRGDRGQI

SEQ ID NO: 126674 - protein, 10 aa, synthetic construct
QNHRGDRGQI

SEQ ID NO: 126675 - protein, 10 aa, synthetic construct
QNSRGDRGQI

SEQ ID NO: 126676 - protein, 10 aa, synthetic construct
QNTRGDRGQI

SEQ ID NO: 126677 - protein, 10 aa, synthetic construct
QNYRGDRGQI

SEQ ID NO: 126678 - protein, 10 aa, synthetic construct
QNNRGDRGQI

SEQ ID NO: 126679 - protein, 10 aa, synthetic construct
QNQRGDRGQI

SEQ ID NO: 126680 - protein, 10 aa, synthetic construct
QNDRGDRGQI

SEQ ID NO: 126681 - protein, 10 aa, synthetic construct
QNERGDRGQI

SEQ ID NO: 126682 - protein, 10 aa, synthetic construct
QQGRGDRGQI

SEQ ID NO: 126683 - protein, 10 aa, synthetic construct
QQARGDRGQI

SEQ ID NO: 126684 - protein, 10 aa, synthetic construct
QQVRGDRGQI

SEQ ID NO: 126685 - protein, 10 aa, synthetic construct
QQPRGDRGQI

SEQ ID NO: 126686 - protein, 10 aa, synthetic construct
QQLRGDRGQI

SEQ ID NO: 126687 - protein, 10 aa, synthetic construct
QQIRGDRGQI

SEQ ID NO: 126688 - protein, 10 aa, synthetic construct
QQMRGDRGQI

SEQ ID NO: 126689 - protein, 10 aa, synthetic construct
QQWRGDRGQI

SEQ ID NO: 126690 - protein, 10 aa, synthetic construct
QQFRGDRGQI

SEQ ID NO: 126691 - protein, 10 aa, synthetic construct
QQKRGDRGQI

SEQ ID NO: 126692 - protein, 10 aa, synthetic construct
QQRRGDRGQI

SEQ ID NO: 126693 - protein, 10 aa, synthetic construct
QQHRGDRGQI

SEQ ID NO: 126694 - protein, 10 aa, synthetic construct
QQSRGDRGQI

SEQ ID NO: 126695 - protein, 10 aa, synthetic construct
QQTRGDRGQI

SEQ ID NO: 126696 - protein, 10 aa, synthetic construct
QQYRGDRGQI

SEQ ID NO: 126697 - protein, 10 aa, synthetic construct
QQNRGDRGQI

SEQ ID NO: 126698 - protein, 10 aa, synthetic construct
QQQRGDRGQI

SEQ ID NO: 126699 - protein, 10 aa, synthetic construct
QQDRGDRGQI

SEQ ID NO: 126700 - protein, 10 aa, synthetic construct
QQERGDRGQI

SEQ ID NO: 126701 - protein, 10 aa, synthetic construct
QDGRGDRGQI

SEQ ID NO: 126702 - protein, 10 aa, synthetic construct
QDARGDRGQI

SEQ ID NO: 126703 - protein, 10 aa, synthetic construct
QDVRGDRGQI

SEQ ID NO: 126704 - protein, 10 aa, synthetic construct
QDPRGDRGQI

SEQ ID NO: 126705 - protein, 10 aa, synthetic construct
QDLRGDRGQI

SEQ ID NO: 126706 - protein, 10 aa, synthetic construct
QDIRGDRGQI

SEQ ID NO: 126707 - protein, 10 aa, synthetic construct
QDMRGDRGQI

SEQ ID NO: 126708 - protein, 10 aa, synthetic construct
QDWRGDRGQI

SEQ ID NO: 126709 - protein, 10 aa, synthetic construct
QDFRGDRGQI

SEQ ID NO: 126710 - protein, 10 aa, synthetic construct
QDKRGDRGQI

SEQ ID NO: 126711 - protein, 10 aa, synthetic construct
QDRRGDRGQI

SEQ ID NO: 126712 - protein, 10 aa, synthetic construct
QDHRGDRGQI

SEQ ID NO: 126713 - protein, 10 aa, synthetic construct
QDSRGDRGQI

SEQ ID NO: 126714 - protein, 10 aa, synthetic construct
QDTRGDRGQI

SEQ ID NO: 126715 - protein, 10 aa, synthetic construct
QDYRGDRGQI

SEQ ID NO: 126716 - protein, 10 aa, synthetic construct
QDNRGDRGQI

SEQ ID NO: 126717 - protein, 10 aa, synthetic construct
QDQRGDRGQI

SEQ ID NO: 126718 - protein, 10 aa, synthetic construct
QDDRGDRGQI

SEQ ID NO: 126719 - protein, 10 aa, synthetic construct
QDERGDRGQI

SEQ ID NO: 126720 - protein, 10 aa, synthetic construct
QEGRGDRGQI

SEQ ID NO: 126721 - protein, 10 aa, synthetic construct
QEARGDRGQI

SEQ ID NO: 126722 - protein, 10 aa, synthetic construct
QEVRGDRGQI

SEQ ID NO: 126723 - protein, 10 aa, synthetic construct
QEPRGDRGQI

SEQ ID NO: 126724 - protein, 10 aa, synthetic construct
QELRGDRGQI

SEQ ID NO: 126725 - protein, 10 aa, synthetic construct
QEIRGDRGQI

SEQ ID NO: 126726 - protein, 10 aa, synthetic construct
QEMRGDRGQI

SEQ ID NO: 126727 - protein, 10 aa, synthetic construct
QEWRGDRGQI

SEQ ID NO: 126728 - protein, 10 aa, synthetic construct
QEFRGDRGQI

SEQ ID NO: 126729 - protein, 10 aa, synthetic construct
QEKRGDRGQI

SEQ ID NO: 126730 - protein, 10 aa, synthetic construct
QERRGDRGQI

SEQ ID NO: 126731 - protein, 10 aa, synthetic construct
QEHRGDRGQI

SEQ ID NO: 126732 - protein, 10 aa, synthetic construct
QESRGDRGQI

SEQ ID NO: 126733 - protein, 10 aa, synthetic construct
QETRGDRGQI

SEQ ID NO: 126734 - protein, 10 aa, synthetic construct
QEYRGDRGQI

SEQ ID NO: 126735 - protein, 10 aa, synthetic construct
QENRGDRGQI

SEQ ID NO: 126736 - protein, 10 aa, synthetic construct
QEQRGDRGQI

SEQ ID NO: 126737 - protein, 10 aa, synthetic construct
QEDRGDRGQI

SEQ ID NO: 126738 - protein, 10 aa, synthetic construct
QEERGDRGQI

SEQ ID NO: 126739 - protein, 10 aa, synthetic construct
SGGRGDRGVV

SEQ ID NO: 126740 - protein, 10 aa, synthetic construct
SGARGDRGVV

SEQ ID NO: 126741 - protein, 10 aa, synthetic construct
SGVRGDRGVV

SEQ ID NO: 126742 - protein, 10 aa, synthetic construct
SGPRGDRGVV

SEQ ID NO: 126743 - protein, 10 aa, synthetic construct
SGLRGDRGVV

SEQ ID NO: 126744 - protein, 10 aa, synthetic construct
SGIRGDRGVV

SEQ ID NO: 126745 - protein, 10 aa, synthetic construct
SGMRGDRGVV

SEQ ID NO: 126746 - protein, 10 aa, synthetic construct
SGWRGDRGVV

SEQ ID NO: 126747 - protein, 10 aa, synthetic construct
SGFRGDRGVV

SEQ ID NO: 126748 - protein, 10 aa, synthetic construct
SGKRGDRGVV

SEQ ID NO: 126749 - protein, 10 aa, synthetic construct
SGRRGDRGVV

SEQ ID NO: 126750 - protein, 10 aa, synthetic construct
SGHRGDRGVV

SEQ ID NO: 126751 - protein, 10 aa, synthetic construct
SGSRGDRGVV

SEQ ID NO: 126752 - protein, 10 aa, synthetic construct
SGTRGDRGVV

SEQ ID NO: 126753 - protein, 10 aa, synthetic construct
SGYRGDRGVV

SEQ ID NO: 126754 - protein, 10 aa, synthetic construct
SGNRGDRGVV

SEQ ID NO: 126755 - protein, 10 aa, synthetic construct
SGQRGDRGVV

SEQ ID NO: 126756 - protein, 10 aa, synthetic construct
SGDRGDRGVV

SEQ ID NO: 126757 - protein, 10 aa, synthetic construct
SGERGDRGVV

SEQ ID NO: 126758 - protein, 10 aa, synthetic construct
SAGRGDRGVV

SEQ ID NO: 126759 - protein, 10 aa, synthetic construct
SAARGDRGVV

SEQ ID NO: 126760 - protein, 10 aa, synthetic construct
SAVRGDRGVV

SEQ ID NO: 126761 - protein, 10 aa, synthetic construct
SAPRGDRGVV

SEQ ID NO: 126762 - protein, 10 aa, synthetic construct
SALRGDRGVV

SEQ ID NO: 126763 - protein, 10 aa, synthetic construct
SAIRGDRGVV

SEQ ID NO: 126764 - protein, 10 aa, synthetic construct
SAMRGDRGVV

SEQ ID NO: 126765 - protein, 10 aa, synthetic construct
SAWRGDRGVV

SEQ ID NO: 126766 - protein, 10 aa, synthetic construct
SAFRGDRGVV

SEQ ID NO: 126767 - protein, 10 aa, synthetic construct
SAKRGDRGVV

SEQ ID NO: 126768 - protein, 10 aa, synthetic construct
SARRGDRGVV

SEQ ID NO: 126769 - protein, 10 aa, synthetic construct
SAHRGDRGVV

SEQ ID NO: 126770 - protein, 10 aa, synthetic construct
SASRGDRGVV

SEQ ID NO: 126771 - protein, 10 aa, synthetic construct
SATRGDRGVV

SEQ ID NO: 126772 - protein, 10 aa, synthetic construct
SAYRGDRGVV

SEQ ID NO: 126773 - protein, 10 aa, synthetic construct
SANRGDRGVV

SEQ ID NO: 126774 - protein, 10 aa, synthetic construct
SADRGDRGVV

SEQ ID NO: 126775 - protein, 10 aa, synthetic construct
SAERGDRGVV

SEQ ID NO: 126776 - protein, 10 aa, synthetic construct
SVGRGDRGVV

SEQ ID NO: 126777 - protein, 10 aa, synthetic construct
SVARGDRGVV

SEQ ID NO: 126778 - protein, 10 aa, synthetic construct
SVVRGDRGVV

SEQ ID NO: 126779 - protein, 10 aa, synthetic construct
SVPRGDRGVV

SEQ ID NO: 126780 - protein, 10 aa, synthetic construct
SVLRGDRGVV

SEQ ID NO: 126781 - protein, 10 aa, synthetic construct
SVIRGDRGVV

SEQ ID NO: 126782 - protein, 10 aa, synthetic construct
SVMRGDRGVV

SEQ ID NO: 126783 - protein, 10 aa, synthetic construct
SVWRGDRGVV

SEQ ID NO: 126784 - protein, 10 aa, synthetic construct
SVFRGDRGVV

SEQ ID NO: 126785 - protein, 10 aa, synthetic construct
SVKRGDRGVV

SEQ ID NO: 126786 - protein, 10 aa, synthetic construct
SVRRGDRGVV

SEQ ID NO: 126787 - protein, 10 aa, synthetic construct
SVHRGDRGVV

SEQ ID NO: 126788 - protein, 10 aa, synthetic construct
SVSRGDRGVV

SEQ ID NO: 126789 - protein, 10 aa, synthetic construct
SVTRGDRGVV

SEQ ID NO: 126790 - protein, 10 aa, synthetic construct
SVYRGDRGVV

SEQ ID NO: 126791 - protein, 10 aa, synthetic construct
SVNRGDRGVV

SEQ ID NO: 126792 - protein, 10 aa, synthetic construct
SVQRGDRGVV

SEQ ID NO: 126793 - protein, 10 aa, synthetic construct
SVDRGDRGVV

SEQ ID NO: 126794 - protein, 10 aa, synthetic construct
SVERGDRGVV

SEQ ID NO: 126795 - protein, 10 aa, synthetic construct
SPGRGDRGVV

SEQ ID NO: 126796 - protein, 10 aa, synthetic construct
SPARGDRGVV

SEQ ID NO: 126797 - protein, 10 aa, synthetic construct
SPVRGDRGVV

SEQ ID NO: 126798 - protein, 10 aa, synthetic construct
SPPRGDRGVV

SEQ ID NO: 126799 - protein, 10 aa, synthetic construct
SPLRGDRGVV

SEQ ID NO: 126800 - protein, 10 aa, synthetic construct
SPIRGDRGVV

SEQ ID NO: 126801 - protein, 10 aa, synthetic construct
SPMRGDRGVV

SEQ ID NO: 126802 - protein, 10 aa, synthetic construct
SPWRGDRGVV

SEQ ID NO: 126803 - protein, 10 aa, synthetic construct
SPFRGDRGVV

SEQ ID NO: 126804 - protein, 10 aa, synthetic construct
SPKRGDRGVV

SEQ ID NO: 126805 - protein, 10 aa, synthetic construct
SPRRGDRGVV

SEQ ID NO: 126806 - protein, 10 aa, synthetic construct
SPHRGDRGVV

SEQ ID NO: 126807 - protein, 10 aa, synthetic construct
SPSRGDRGVV

SEQ ID NO: 126808 - protein, 10 aa, synthetic construct
SPTRGDRGVV

SEQ ID NO: 126809 - protein, 10 aa, synthetic construct
SPYRGDRGVV

SEQ ID NO: 126810 - protein, 10 aa, synthetic construct
SPNRGDRGVV

SEQ ID NO: 126811 - protein, 10 aa, synthetic construct
SPQRGDRGVV

SEQ ID NO: 126812 - protein, 10 aa, synthetic construct
SPDRGDRGVV

SEQ ID NO: 126813 - protein, 10 aa, synthetic construct
SPERGDRGVV

SEQ ID NO: 126814 - protein, 10 aa, synthetic construct
SLGRGDRGVV

SEQ ID NO: 126815 - protein, 10 aa, synthetic construct
SLARGDRGVV

SEQ ID NO: 126816 - protein, 10 aa, synthetic construct
SLVRGDRGVV

SEQ ID NO: 126817 - protein, 10 aa, synthetic construct
SLPRGDRGVV

SEQ ID NO: 126818 - protein, 10 aa, synthetic construct
SLLRGDRGVV

SEQ ID NO: 126819 - protein, 10 aa, synthetic construct
SLIRGDRGVV

SEQ ID NO: 126820 - protein, 10 aa, synthetic construct
SLMRGDRGVV

SEQ ID NO: 126821 - protein, 10 aa, synthetic construct
SLWRGDRGVV

SEQ ID NO: 126822 - protein, 10 aa, synthetic construct
SLFRGDRGVV

SEQ ID NO: 126823 - protein, 10 aa, synthetic construct
SLKRGDRGVV

SEQ ID NO: 126824 - protein, 10 aa, synthetic construct
SLRRGDRGVV

SEQ ID NO: 126825 - protein, 10 aa, synthetic construct
SLHRGDRGVV

SEQ ID NO: 126826 - protein, 10 aa, synthetic construct
SLSRGDRGVV

SEQ ID NO: 126827 - protein, 10 aa, synthetic construct
SLTRGDRGVV

SEQ ID NO: 126828 - protein, 10 aa, synthetic construct
SLYRGDRGVV

SEQ ID NO: 126829 - protein, 10 aa, synthetic construct
SLNRGDRGVV

SEQ ID NO: 126830 - protein, 10 aa, synthetic construct
SLQRGDRGVV

SEQ ID NO: 126831 - protein, 10 aa, synthetic construct
SLDRGDRGVV

SEQ ID NO: 126832 - protein, 10 aa, synthetic construct
SLERGDRGVV

SEQ ID NO: 126833 - protein, 10 aa, synthetic construct
SIGRGDRGVV

SEQ ID NO: 126834 - protein, 10 aa, synthetic construct
SIARGDRGVV

SEQ ID NO: 126835 - protein, 10 aa, synthetic construct
SIVRGDRGVV

SEQ ID NO: 126836 - protein, 10 aa, synthetic construct
SIPRGDRGVV

SEQ ID NO: 126837 - protein, 10 aa, synthetic construct
SILRGDRGVV

SEQ ID NO: 126838 - protein, 10 aa, synthetic construct
SIIRGDRGVV

SEQ ID NO: 126839 - protein, 10 aa, synthetic construct
SIMRGDRGVV

SEQ ID NO: 126840 - protein, 10 aa, synthetic construct
SIWRGDRGVV

SEQ ID NO: 126841 - protein, 10 aa, synthetic construct
SIFRGDRGVV

SEQ ID NO: 126842 - protein, 10 aa, synthetic construct
SIKRGDRGVV

SEQ ID NO: 126843 - protein, 10 aa, synthetic construct
SIRRGDRGVV

SEQ ID NO: 126844 - protein, 10 aa, synthetic construct
SIHRGDRGVV

SEQ ID NO: 126845 - protein, 10 aa, synthetic construct
SISRGDRGVV

SEQ ID NO: 126846 - protein, 10 aa, synthetic construct
SITRGDRGVV

SEQ ID NO: 126847 - protein, 10 aa, synthetic construct
SIYRGDRGVV

SEQ ID NO: 126848 - protein, 10 aa, synthetic construct
SINRGDRGVV

SEQ ID NO: 126849 - protein, 10 aa, synthetic construct
SIQRGDRGVV

SEQ ID NO: 126850 - protein, 10 aa, synthetic construct
SIDRGDRGVV

SEQ ID NO: 126851 - protein, 10 aa, synthetic construct
SIERGDRGVV

SEQ ID NO: 126852 - protein, 10 aa, synthetic construct
SMGRGDRGVV

SEQ ID NO: 126853 - protein, 10 aa, synthetic construct
SMARGDRGVV

SEQ ID NO: 126854 - protein, 10 aa, synthetic construct
SMVRGDRGVV

SEQ ID NO: 126855 - protein, 10 aa, synthetic construct
SMPRGDRGVV

SEQ ID NO: 126856 - protein, 10 aa, synthetic construct
SMLRGDRGVV

SEQ ID NO: 126857 - protein, 10 aa, synthetic construct
SMIRGDRGVV

SEQ ID NO: 126858 - protein, 10 aa, synthetic construct
SMMRGDRGVV

SEQ ID NO: 126859 - protein, 10 aa, synthetic construct
SMWRGDRGVV

SEQ ID NO: 126860 - protein, 10 aa, synthetic construct
SMFRGDRGVV

SEQ ID NO: 126861 - protein, 10 aa, synthetic construct
SMKRGDRGVV

SEQ ID NO: 126862 - protein, 10 aa, synthetic construct
SMRRGDRGVV

SEQ ID NO: 126863 - protein, 10 aa, synthetic construct
SMHRGDRGVV

SEQ ID NO: 126864 - protein, 10 aa, synthetic construct
SMSRGDRGVV

SEQ ID NO: 126865 - protein, 10 aa, synthetic construct
SMTRGDRGVV

SEQ ID NO: 126866 - protein, 10 aa, synthetic construct
SMYRGDRGVV

SEQ ID NO: 126867 - protein, 10 aa, synthetic construct
SMNRGDRGVV

SEQ ID NO: 126868 - protein, 10 aa, synthetic construct
SMQRGDRGVV

SEQ ID NO: 126869 - protein, 10 aa, synthetic construct
SMDRGDRGVV

SEQ ID NO: 126870 - protein, 10 aa, synthetic construct
SMERGDRGVV

SEQ ID NO: 126871 - protein, 10 aa, synthetic construct
SWGRGDRGVV

SEQ ID NO: 126872 - protein, 10 aa, synthetic construct
SWARGDRGVV

SEQ ID NO: 126873 - protein, 10 aa, synthetic construct
SWVRGDRGVV

SEQ ID NO: 126874 - protein, 10 aa, synthetic construct
SWPRGDRGVV

SEQ ID NO: 126875 - protein, 10 aa, synthetic construct
SWLRGDRGVV

SEQ ID NO: 126876 - protein, 10 aa, synthetic construct
SWIRGDRGVV

SEQ ID NO: 126877 - protein, 10 aa, synthetic construct
SWMRGDRGVV

SEQ ID NO: 126878 - protein, 10 aa, synthetic construct
SWWRGDRGVV

SEQ ID NO: 126879 - protein, 10 aa, synthetic construct
SWFRGDRGVV

SEQ ID NO: 126880 - protein, 10 aa, synthetic construct
SWKRGDRGVV

SEQ ID NO: 126881 - protein, 10 aa, synthetic construct
SWRRGDRGVV

SEQ ID NO: 126882 - protein, 10 aa, synthetic construct
SWHRGDRGVV

SEQ ID NO: 126883 - protein, 10 aa, synthetic construct
SWSRGDRGVV

SEQ ID NO: 126884 - protein, 10 aa, synthetic construct
SWTRGDRGVV

SEQ ID NO: 126885 - protein, 10 aa, synthetic construct
SWYRGDRGVV

SEQ ID NO: 126886 - protein, 10 aa, synthetic construct
SWNRGDRGVV

SEQ ID NO: 126887 - protein, 10 aa, synthetic construct
SWQRGDRGVV

SEQ ID NO: 126888 - protein, 10 aa, synthetic construct
SWDRGDRGVV

SEQ ID NO: 126889 - protein, 10 aa, synthetic construct
SWERGDRGVV

SEQ ID NO: 126890 - protein, 10 aa, synthetic construct
SFGRGDRGVV

SEQ ID NO: 126891 - protein, 10 aa, synthetic construct
SFARGDRGVV

SEQ ID NO: 126892 - protein, 10 aa, synthetic construct
SFVRGDRGVV

SEQ ID NO: 126893 - protein, 10 aa, synthetic construct
SFPRGDRGVV

SEQ ID NO: 126894 - protein, 10 aa, synthetic construct
SFLRGDRGVV

SEQ ID NO: 126895 - protein, 10 aa, synthetic construct
SFIRGDRGVV

SEQ ID NO: 126896 - protein, 10 aa, synthetic construct
SFMRGDRGVV

SEQ ID NO: 126897 - protein, 10 aa, synthetic construct
SFWRGDRGVV

SEQ ID NO: 126898 - protein, 10 aa, synthetic construct
SFFRGDRGVV

SEQ ID NO: 126899 - protein, 10 aa, synthetic construct
SFKRGDRGVV

SEQ ID NO: 126900 - protein, 10 aa, synthetic construct
SFRRGDRGVV

SEQ ID NO: 126901 - protein, 10 aa, synthetic construct
SFHRGDRGVV

SEQ ID NO: 126902 - protein, 10 aa, synthetic construct
SFSRGDRGVV

SEQ ID NO: 126903 - protein, 10 aa, synthetic construct
SFTRGDRGVV

SEQ ID NO: 126904 - protein, 10 aa, synthetic construct
SFYRGDRGVV

SEQ ID NO: 126905 - protein, 10 aa, synthetic construct
SFNRGDRGVV

SEQ ID NO: 126906 - protein, 10 aa, synthetic construct
SFQRGDRGVV

SEQ ID NO: 126907 - protein, 10 aa, synthetic construct
SFDRGDRGVV

SEQ ID NO: 126908 - protein, 10 aa, synthetic construct
SFERGDRGVV

SEQ ID NO: 126909 - protein, 10 aa, synthetic construct
SKGRGDRGVV

SEQ ID NO: 126910 - protein, 10 aa, synthetic construct
SKARGDRGVV

SEQ ID NO: 126911 - protein, 10 aa, synthetic construct
SKVRGDRGVV

SEQ ID NO: 126912 - protein, 10 aa, synthetic construct
SKPRGDRGVV

SEQ ID NO: 126913 - protein, 10 aa, synthetic construct
SKLRGDRGVV

SEQ ID NO: 126914 - protein, 10 aa, synthetic construct
SKIRGDRGVV

SEQ ID NO: 126915 - protein, 10 aa, synthetic construct
SKMRGDRGVV

SEQ ID NO: 126916 - protein, 10 aa, synthetic construct
SKWRGDRGVV

SEQ ID NO: 126917 - protein, 10 aa, synthetic construct
SKFRGDRGVV

SEQ ID NO: 126918 - protein, 10 aa, synthetic construct
SKKRGDRGVV

SEQ ID NO: 126919 - protein, 10 aa, synthetic construct
SKRRGDRGVV

SEQ ID NO: 126920 - protein, 10 aa, synthetic construct
SKHRGDRGVV

SEQ ID NO: 126921 - protein, 10 aa, synthetic construct
SKSRGDRGVV

SEQ ID NO: 126922 - protein, 10 aa, synthetic construct
SKTRGDRGVV

SEQ ID NO: 126923 - protein, 10 aa, synthetic construct
SKYRGDRGVV

SEQ ID NO: 126924 - protein, 10 aa, synthetic construct
SKNRGDRGVV

SEQ ID NO: 126925 - protein, 10 aa, synthetic construct
SKQRGDRGVV

SEQ ID NO: 126926 - protein, 10 aa, synthetic construct
SKDRGDRGVV

SEQ ID NO: 126927 - protein, 10 aa, synthetic construct
SKERGDRGVV

SEQ ID NO: 126928 - protein, 10 aa, synthetic construct
SRGRGDRGVV

SEQ ID NO: 126929 - protein, 10 aa, synthetic construct
SRARGDRGVV

SEQ ID NO: 126930 - protein, 10 aa, synthetic construct
SRVRGDRGVV

SEQ ID NO: 126931 - protein, 10 aa, synthetic construct
SRPRGDRGVV

SEQ ID NO: 126932 - protein, 10 aa, synthetic construct
SRLRGDRGVV

SEQ ID NO: 126933 - protein, 10 aa, synthetic construct
SRIRGDRGVV

SEQ ID NO: 126934 - protein, 10 aa, synthetic construct
SRMRGDRGVV

SEQ ID NO: 126935 - protein, 10 aa, synthetic construct
SRWRGDRGVV

SEQ ID NO: 126936 - protein, 10 aa, synthetic construct
SRFRGDRGVV

SEQ ID NO: 126937 - protein, 10 aa, synthetic construct
SRKRGDRGVV

SEQ ID NO: 126938 - protein, 10 aa, synthetic construct
SRRRGDRGVV

SEQ ID NO: 126939 - protein, 10 aa, synthetic construct
SRHRGDRGVV

SEQ ID NO: 126940 - protein, 10 aa, synthetic construct
SRSRGDRGVV

SEQ ID NO: 126941 - protein, 10 aa, synthetic construct
SRTRGDRGVV

SEQ ID NO: 126942 - protein, 10 aa, synthetic construct
SRYRGDRGVV

SEQ ID NO: 126943 - protein, 10 aa, synthetic construct
SRNRGDRGVV

SEQ ID NO: 126944 - protein, 10 aa, synthetic construct
SRQRGDRGVV

SEQ ID NO: 126945 - protein, 10 aa, synthetic construct
SRDRGDRGVV

SEQ ID NO: 126946 - protein, 10 aa, synthetic construct
SRERGDRGVV

SEQ ID NO: 126947 - protein, 10 aa, synthetic construct
SHGRGDRGVV

SEQ ID NO: 126948 - protein, 10 aa, synthetic construct
SHARGDRGVV

SEQ ID NO: 126949 - protein, 10 aa, synthetic construct
SHVRGDRGVV

SEQ ID NO: 126950 - protein, 10 aa, synthetic construct
SHPRGDRGVV

SEQ ID NO: 126951 - protein, 10 aa, synthetic construct
SHLRGDRGVV

SEQ ID NO: 126952 - protein, 10 aa, synthetic construct
SHIRGDRGVV

SEQ ID NO: 126953 - protein, 10 aa, synthetic construct
SHMRGDRGVV

SEQ ID NO: 126954 - protein, 10 aa, synthetic construct
SHWRGDRGVV

SEQ ID NO: 126955 - protein, 10 aa, synthetic construct
SHFRGDRGVV

SEQ ID NO: 126956 - protein, 10 aa, synthetic construct
SHKRGDRGVV

SEQ ID NO: 126957 - protein, 10 aa, synthetic construct
SHRRGDRGVV

SEQ ID NO: 126958 - protein, 10 aa, synthetic construct
SHHRGDRGVV

SEQ ID NO: 126959 - protein, 10 aa, synthetic construct
SHSRGDRGVV

SEQ ID NO: 126960 - protein, 10 aa, synthetic construct
SHTRGDRGVV

SEQ ID NO: 126961 - protein, 10 aa, synthetic construct
SHYRGDRGVV

SEQ ID NO: 126962 - protein, 10 aa, synthetic construct
SHNRGDRGVV

SEQ ID NO: 126963 - protein, 10 aa, synthetic construct
SHQRGDRGVV

SEQ ID NO: 126964 - protein, 10 aa, synthetic construct
SHDRGDRGVV

SEQ ID NO: 126965 - protein, 10 aa, synthetic construct
SHERGDRGVV

SEQ ID NO: 126966 - protein, 10 aa, synthetic construct
SSGRGDRGVV

SEQ ID NO: 126967 - protein, 10 aa, synthetic construct
SSARGDRGVV

SEQ ID NO: 126968 - protein, 10 aa, synthetic construct
SSVRGDRGVV

SEQ ID NO: 126969 - protein, 10 aa, synthetic construct
SSPRGDRGVV

SEQ ID NO: 126970 - protein, 10 aa, synthetic construct
SSLRGDRGVV

SEQ ID NO: 126971 - protein, 10 aa, synthetic construct
SSIRGDRGVV

SEQ ID NO: 126972 - protein, 10 aa, synthetic construct
SSMRGDRGVV

SEQ ID NO: 126973 - protein, 10 aa, synthetic construct
SSWRGDRGVV

SEQ ID NO: 126974 - protein, 10 aa, synthetic construct
SSFRGDRGVV

SEQ ID NO: 126975 - protein, 10 aa, synthetic construct
SSKRGDRGVV

SEQ ID NO: 126976 - protein, 10 aa, synthetic construct
SSRRGDRGVV

SEQ ID NO: 126977 - protein, 10 aa, synthetic construct
SSHRGDRGVV

SEQ ID NO: 126978 - protein, 10 aa, synthetic construct
SSSRGDRGVV

SEQ ID NO: 126979 - protein, 10 aa, synthetic construct
SSTRGDRGVV

SEQ ID NO: 126980 - protein, 10 aa, synthetic construct
SSYRGDRGVV

SEQ ID NO: 126981 - protein, 10 aa, synthetic construct
SSNRGDRGVV

SEQ ID NO: 126982 - protein, 10 aa, synthetic construct
SSQRGDRGVV

SEQ ID NO: 126983 - protein, 10 aa, synthetic construct
SSDRGDRGVV

SEQ ID NO: 126984 - protein, 10 aa, synthetic construct
SSERGDRGVV

SEQ ID NO: 126985 - protein, 10 aa, synthetic construct
STGRGDRGVV

SEQ ID NO: 126986 - protein, 10 aa, synthetic construct
STARGDRGVV

SEQ ID NO: 126987 - protein, 10 aa, synthetic construct
STVRGDRGVV

SEQ ID NO: 126988 - protein, 10 aa, synthetic construct
STPRGDRGVV

SEQ ID NO: 126989 - protein, 10 aa, synthetic construct
STLRGDRGVV

SEQ ID NO: 126990 - protein, 10 aa, synthetic construct
STIRGDRGVV

SEQ ID NO: 126991 - protein, 10 aa, synthetic construct
STMRGDRGVV

SEQ ID NO: 126992 - protein, 10 aa, synthetic construct
STWRGDRGVV

SEQ ID NO: 126993 - protein, 10 aa, synthetic construct
STFRGDRGVV

SEQ ID NO: 126994 - protein, 10 aa, synthetic construct
STKRGDRGVV

SEQ ID NO: 126995 - protein, 10 aa, synthetic construct
STRRGDRGVV

SEQ ID NO: 126996 - protein, 10 aa, synthetic construct
STHRGDRGVV

SEQ ID NO: 126997 - protein, 10 aa, synthetic construct
STSRGDRGVV

SEQ ID NO: 126998 - protein, 10 aa, synthetic construct
STTRGDRGVV

SEQ ID NO: 126999 - protein, 10 aa, synthetic construct
STYRGDRGVV

SEQ ID NO: 127000 - protein, 10 aa, synthetic construct
STNRGDRGVV

SEQ ID NO: 127001 - protein, 10 aa, synthetic construct
STQRGDRGVV

SEQ ID NO: 127002 - protein, 10 aa, synthetic construct
STDRGDRGVV

SEQ ID NO: 127003 - protein, 10 aa, synthetic construct
STERGDRGVV

SEQ ID NO: 127004 - protein, 10 aa, synthetic construct
SYGRGDRGVV

SEQ ID NO: 127005 - protein, 10 aa, synthetic construct
SYARGDRGVV

SEQ ID NO: 127006 - protein, 10 aa, synthetic construct
SYVRGDRGVV

SEQ ID NO: 127007 - protein, 10 aa, synthetic construct
SYPRGDRGVV

SEQ ID NO: 127008 - protein, 10 aa, synthetic construct
SYLRGDRGVV

SEQ ID NO: 127009 - protein, 10 aa, synthetic construct
SYIRGDRGVV

SEQ ID NO: 127010 - protein, 10 aa, synthetic construct
SYMRGDRGVV

SEQ ID NO: 127011 - protein, 10 aa, synthetic construct
SYWRGDRGVV

SEQ ID NO: 127012 - protein, 10 aa, synthetic construct
SYFRGDRGVV

SEQ ID NO: 127013 - protein, 10 aa, synthetic construct
SYKRGDRGVV

SEQ ID NO: 127014 - protein, 10 aa, synthetic construct
SYRRGDRGVV

SEQ ID NO: 127015 - protein, 10 aa, synthetic construct
SYHRGDRGVV

SEQ ID NO: 127016 - protein, 10 aa, synthetic construct
SYSRGDRGVV

SEQ ID NO: 127017 - protein, 10 aa, synthetic construct
SYTRGDRGVV

SEQ ID NO: 127018 - protein, 10 aa, synthetic construct
SYYRGDRGVV

SEQ ID NO: 127019 - protein, 10 aa, synthetic construct
SYNRGDRGVV

SEQ ID NO: 127020 - protein, 10 aa, synthetic construct
SYQRGDRGVV

SEQ ID NO: 127021 - protein, 10 aa, synthetic construct
SYDRGDRGVV

SEQ ID NO: 127022 - protein, 10 aa, synthetic construct
SYERGDRGVV

SEQ ID NO: 127023 - protein, 10 aa, synthetic construct
SNGRGDRGVV

SEQ ID NO: 127024 - protein, 10 aa, synthetic construct
SNARGDRGVV

SEQ ID NO: 127025 - protein, 10 aa, synthetic construct
SNVRGDRGVV

SEQ ID NO: 127026 - protein, 10 aa, synthetic construct
SNPRGDRGVV

SEQ ID NO: 127027 - protein, 10 aa, synthetic construct
SNLRGDRGVV

SEQ ID NO: 127028 - protein, 10 aa, synthetic construct
SNIRGDRGVV

SEQ ID NO: 127029 - protein, 10 aa, synthetic construct
SNMRGDRGVV

SEQ ID NO: 127030 - protein, 10 aa, synthetic construct
SNWRGDRGVV

SEQ ID NO: 127031 - protein, 10 aa, synthetic construct
SNFRGDRGVV

SEQ ID NO: 127032 - protein, 10 aa, synthetic construct
SNKRGDRGVV

SEQ ID NO: 127033 - protein, 10 aa, synthetic construct
SNRRGDRGVV

SEQ ID NO: 127034 - protein, 10 aa, synthetic construct
SNHRGDRGVV

SEQ ID NO: 127035 - protein, 10 aa, synthetic construct
SNSRGDRGVV

SEQ ID NO: 127036 - protein, 10 aa, synthetic construct
SNTRGDRGVV

SEQ ID NO: 127037 - protein, 10 aa, synthetic construct
SNYRGDRGVV

SEQ ID NO: 127038 - protein, 10 aa, synthetic construct
SNNRGDRGVV

SEQ ID NO: 127039 - protein, 10 aa, synthetic construct
SNQRGDRGVV

SEQ ID NO: 127040 - protein, 10 aa, synthetic construct
SNDRGDRGVV

SEQ ID NO: 127041 - protein, 10 aa, synthetic construct
SNERGDRGVV

SEQ ID NO: 127042 - protein, 10 aa, synthetic construct
SQGRGDRGVV

SEQ ID NO: 127043 - protein, 10 aa, synthetic construct
SQARGDRGVV

SEQ ID NO: 127044 - protein, 10 aa, synthetic construct
SQVRGDRGVV

SEQ ID NO: 127045 - protein, 10 aa, synthetic construct
SQPRGDRGVV

SEQ ID NO: 127046 - protein, 10 aa, synthetic construct
SQLRGDRGVV

SEQ ID NO: 127047 - protein, 10 aa, synthetic construct
SQIRGDRGVV

SEQ ID NO: 127048 - protein, 10 aa, synthetic construct
SQMRGDRGVV

SEQ ID NO: 127049 - protein, 10 aa, synthetic construct
SQWRGDRGVV

SEQ ID NO: 127050 - protein, 10 aa, synthetic construct
SQFRGDRGVV

SEQ ID NO: 127051 - protein, 10 aa, synthetic construct
SQKRGDRGVV

SEQ ID NO: 127052 - protein, 10 aa, synthetic construct
SQRRGDRGVV

SEQ ID NO: 127053 - protein, 10 aa, synthetic construct
SQHRGDRGVV

SEQ ID NO: 127054 - protein, 10 aa, synthetic construct
SQSRGDRGVV

SEQ ID NO: 127055 - protein, 10 aa, synthetic construct
SQTRGDRGVV

SEQ ID NO: 127056 - protein, 10 aa, synthetic construct
SQYRGDRGVV

SEQ ID NO: 127057 - protein, 10 aa, synthetic construct
SQNRGDRGVV

SEQ ID NO: 127058 - protein, 10 aa, synthetic construct
SQQRGDRGVV

SEQ ID NO: 127059 - protein, 10 aa, synthetic construct
SQDRGDRGVV

SEQ ID NO: 127060 - protein, 10 aa, synthetic construct
SQERGDRGVV

SEQ ID NO: 127061 - protein, 10 aa, synthetic construct
SDGRGDRGVV

SEQ ID NO: 127062 - protein, 10 aa, synthetic construct
SDARGDRGVV

SEQ ID NO: 127063 - protein, 10 aa, synthetic construct
SDVRGDRGVV

SEQ ID NO: 127064 - protein, 10 aa, synthetic construct
SDPRGDRGVV

SEQ ID NO: 127065 - protein, 10 aa, synthetic construct
SDLRGDRGVV

SEQ ID NO: 127066 - protein, 10 aa, synthetic construct
SDIRGDRGVV

SEQ ID NO: 127067 - protein, 10 aa, synthetic construct
SDMRGDRGVV

SEQ ID NO: 127068 - protein, 10 aa, synthetic construct
SDWRGDRGVV

SEQ ID NO: 127069 - protein, 10 aa, synthetic construct
SDFRGDRGVV

SEQ ID NO: 127070 - protein, 10 aa, synthetic construct
SDKRGDRGVV

SEQ ID NO: 127071 - protein, 10 aa, synthetic construct
SDRRGDRGVV

SEQ ID NO: 127072 - protein, 10 aa, synthetic construct
SDHRGDRGVV

SEQ ID NO: 127073 - protein, 10 aa, synthetic construct
SDSRGDRGVV

SEQ ID NO: 127074 - protein, 10 aa, synthetic construct
SDTRGDRGVV

SEQ ID NO: 127075 - protein, 10 aa, synthetic construct
SDYRGDRGVV

SEQ ID NO: 127076 - protein, 10 aa, synthetic construct
SDNRGDRGVV

SEQ ID NO: 127077 - protein, 10 aa, synthetic construct
SDQRGDRGVV

SEQ ID NO: 127078 - protein, 10 aa, synthetic construct
SDDRGDRGVV

SEQ ID NO: 127079 - protein, 10 aa, synthetic construct
SDERGDRGVV

SEQ ID NO: 127080 - protein, 10 aa, synthetic construct
SEGRGDRGVV

SEQ ID NO: 127081 - protein, 10 aa, synthetic construct
SEARGDRGVV

SEQ ID NO: 127082 - protein, 10 aa, synthetic construct
SEVRGDRGVV

SEQ ID NO: 127083 - protein, 10 aa, synthetic construct
SEPRGDRGVV

SEQ ID NO: 127084 - protein, 10 aa, synthetic construct
SELRGDRGVV

SEQ ID NO: 127085 - protein, 10 aa, synthetic construct
SEIRGDRGVV

SEQ ID NO: 127086 - protein, 10 aa, synthetic construct
SEMRGDRGVV

SEQ ID NO: 127087 - protein, 10 aa, synthetic construct
SEWRGDRGVV

SEQ ID NO: 127088 - protein, 10 aa, synthetic construct
SEFRGDRGVV

SEQ ID NO: 127089 - protein, 10 aa, synthetic construct
SEKRGDRGVV

SEQ ID NO: 127090 - protein, 10 aa, synthetic construct
SERRGDRGVV

SEQ ID NO: 127091 - protein, 10 aa, synthetic construct
SEHRGDRGVV

SEQ ID NO: 127092 - protein, 10 aa, synthetic construct
SESRGDRGVV

SEQ ID NO: 127093 - protein, 10 aa, synthetic construct
SETRGDRGVV

SEQ ID NO: 127094 - protein, 10 aa, synthetic construct
SEYRGDRGVV

SEQ ID NO: 127095 - protein, 10 aa, synthetic construct
SENRGDRGVV

SEQ ID NO: 127096 - protein, 10 aa, synthetic construct
SEQRGDRGVV

SEQ ID NO: 127097 - protein, 10 aa, synthetic construct
SEDRGDRGVV

SEQ ID NO: 127098 - protein, 10 aa, synthetic construct
SEERGDRGVV

SEQ ID NO: 127099 - protein, 10 aa, synthetic construct
TGGRGDRGVV

SEQ ID NO: 127100 - protein, 10 aa, synthetic construct
TGARGDRGVV

SEQ ID NO: 127101 - protein, 10 aa, synthetic construct
TGVRGDRGVV

SEQ ID NO: 127102 - protein, 10 aa, synthetic construct
TGPRGDRGVV

SEQ ID NO: 127103 - protein, 10 aa, synthetic construct
TGLRGDRGVV

SEQ ID NO: 127104 - protein, 10 aa, synthetic construct
TGIRGDRGVV

SEQ ID NO: 127105 - protein, 10 aa, synthetic construct
TGMRGDRGVV

SEQ ID NO: 127106 - protein, 10 aa, synthetic construct
TGWRGDRGVV

SEQ ID NO: 127107 - protein, 10 aa, synthetic construct
TGFRGDRGVV

SEQ ID NO: 127108 - protein, 10 aa, synthetic construct
TGKRGDRGVV

SEQ ID NO: 127109 - protein, 10 aa, synthetic construct
TGRRGDRGVV

SEQ ID NO: 127110 - protein, 10 aa, synthetic construct
TGHRGDRGVV

SEQ ID NO: 127111 - protein, 10 aa, synthetic construct
TGSRGDRGVV

SEQ ID NO: 127112 - protein, 10 aa, synthetic construct
TGTRGDRGVV

SEQ ID NO: 127113 - protein, 10 aa, synthetic construct
TGYRGDRGVV

SEQ ID NO: 127114 - protein, 10 aa, synthetic construct
TGNRGDRGVV

SEQ ID NO: 127115 - protein, 10 aa, synthetic construct
TGQRGDRGVV

SEQ ID NO: 127116 - protein, 10 aa, synthetic construct
TGDRGDRGVV

SEQ ID NO: 127117 - protein, 10 aa, synthetic construct
TGERGDRGVV

SEQ ID NO: 127118 - protein, 10 aa, synthetic construct
TAGRGDRGVV

SEQ ID NO: 127119 - protein, 10 aa, synthetic construct
TAARGDRGVV

SEQ ID NO: 127120 - protein, 10 aa, synthetic construct
TAVRGDRGVV

SEQ ID NO: 127121 - protein, 10 aa, synthetic construct
TAPRGDRGVV

SEQ ID NO: 127122 - protein, 10 aa, synthetic construct
TALRGDRGVV

SEQ ID NO: 127123 - protein, 10 aa, synthetic construct
TAIRGDRGVV

SEQ ID NO: 127124 - protein, 10 aa, synthetic construct
TAMRGDRGVV

SEQ ID NO: 127125 - protein, 10 aa, synthetic construct
TAWRGDRGVV

SEQ ID NO: 127126 - protein, 10 aa, synthetic construct
TAFRGDRGVV

SEQ ID NO: 127127 - protein, 10 aa, synthetic construct
TAKRGDRGVV

SEQ ID NO: 127128 - protein, 10 aa, synthetic construct
TARRGDRGVV

SEQ ID NO: 127129 - protein, 10 aa, synthetic construct
TAHRGDRGVV

SEQ ID NO: 127130 - protein, 10 aa, synthetic construct
TASRGDRGVV

SEQ ID NO: 127131 - protein, 10 aa, synthetic construct
TATRGDRGVV

SEQ ID NO: 127132 - protein, 10 aa, synthetic construct
TAYRGDRGVV

SEQ ID NO: 127133 - protein, 10 aa, synthetic construct
TANRGDRGVV

SEQ ID NO: 127134 - protein, 10 aa, synthetic construct
TAQRGDRGVV

SEQ ID NO: 127135 - protein, 10 aa, synthetic construct
TADRGDRGVV

SEQ ID NO: 127136 - protein, 10 aa, synthetic construct
TAERGDRGVV

SEQ ID NO: 127137 - protein, 10 aa, synthetic construct
TVGRGDRGVV

SEQ ID NO: 127138 - protein, 10 aa, synthetic construct
TVARGDRGVV

SEQ ID NO: 127139 - protein, 10 aa, synthetic construct
TVVRGDRGVV

SEQ ID NO: 127140 - protein, 10 aa, synthetic construct
TVPRGDRGVV

SEQ ID NO: 127141 - protein, 10 aa, synthetic construct
TVLRGDRGVV

SEQ ID NO: 127142 - protein, 10 aa, synthetic construct
TVIRGDRGVV

SEQ ID NO: 127143 - protein, 10 aa, synthetic construct
TVMRGDRGVV

SEQ ID NO: 127144 - protein, 10 aa, synthetic construct
TVWRGDRGVV

SEQ ID NO: 127145 - protein, 10 aa, synthetic construct
TVFRGDRGVV

SEQ ID NO: 127146 - protein, 10 aa, synthetic construct
TVKRGDRGVV

SEQ ID NO: 127147 - protein, 10 aa, synthetic construct
TVRRGDRGVV

SEQ ID NO: 127148 - protein, 10 aa, synthetic construct
TVHRGDRGVV

SEQ ID NO: 127149 - protein, 10 aa, synthetic construct
TVSRGDRGVV

SEQ ID NO: 127150 - protein, 10 aa, synthetic construct
TVTRGDRGVV

SEQ ID NO: 127151 - protein, 10 aa, synthetic construct
TVYRGDRGVV

SEQ ID NO: 127152 - protein, 10 aa, synthetic construct
TVNRGDRGVV

SEQ ID NO: 127153 - protein, 10 aa, synthetic construct
TVQRGDRGVV

SEQ ID NO: 127154 - protein, 10 aa, synthetic construct
TVDRGDRGVV

SEQ ID NO: 127155 - protein, 10 aa, synthetic construct
TVERGDRGVV

SEQ ID NO: 127156 - protein, 10 aa, synthetic construct
TPGRGDRGVV

SEQ ID NO: 127157 - protein, 10 aa, synthetic construct
TPARGDRGVV

SEQ ID NO: 127158 - protein, 10 aa, synthetic construct
TPVRGDRGVV

SEQ ID NO: 127159 - protein, 10 aa, synthetic construct
TPPRGDRGVV

SEQ ID NO: 127160 - protein, 10 aa, synthetic construct
TPLRGDRGVV

SEQ ID NO: 127161 - protein, 10 aa, synthetic construct
TPIRGDRGVV

SEQ ID NO: 127162 - protein, 10 aa, synthetic construct
TPMRGDRGVV

SEQ ID NO: 127163 - protein, 10 aa, synthetic construct
TPWRGDRGVV

SEQ ID NO: 127164 - protein, 10 aa, synthetic construct
TPFRGDRGVV

SEQ ID NO: 127165 - protein, 10 aa, synthetic construct
TPKRGDRGVV

SEQ ID NO: 127166 - protein, 10 aa, synthetic construct
TPRRGDRGVV

SEQ ID NO: 127167 - protein, 10 aa, synthetic construct
TPHRGDRGVV

SEQ ID NO: 127168 - protein, 10 aa, synthetic construct
TPSRGDRGVV

SEQ ID NO: 127169 - protein, 10 aa, synthetic construct
TPTRGDRGVV

SEQ ID NO: 127170 - protein, 10 aa, synthetic construct
TPYRGDRGVV

SEQ ID NO: 127171 - protein, 10 aa, synthetic construct
TPNRGDRGVV

SEQ ID NO: 127172 - protein, 10 aa, synthetic construct
TPQRGDRGVV

SEQ ID NO: 127173 - protein, 10 aa, synthetic construct
TPDRGDRGVV

SEQ ID NO: 127174 - protein, 10 aa, synthetic construct
TPERGDRGVV

SEQ ID NO: 127175 - protein, 10 aa, synthetic construct
TLGRGDRGVV

SEQ ID NO: 127176 - protein, 10 aa, synthetic construct
TLARGDRGVV

SEQ ID NO: 127177 - protein, 10 aa, synthetic construct
TLVRGDRGVV

SEQ ID NO: 127178 - protein, 10 aa, synthetic construct
TLPRGDRGVV

SEQ ID NO: 127179 - protein, 10 aa, synthetic construct
TLLRGDRGVV

SEQ ID NO: 127180 - protein, 10 aa, synthetic construct
TLIRGDRGVV

SEQ ID NO: 127181 - protein, 10 aa, synthetic construct
TLMRGDRGVV

SEQ ID NO: 127182 - protein, 10 aa, synthetic construct
TLWRGDRGVV

SEQ ID NO: 127183 - protein, 10 aa, synthetic construct
TLFRGDRGVV

SEQ ID NO: 127184 - protein, 10 aa, synthetic construct
TLKRGDRGVV

SEQ ID NO: 127185 - protein, 10 aa, synthetic construct
TLRRGDRGVV

SEQ ID NO: 127186 - protein, 10 aa, synthetic construct
TLHRGDRGVV

SEQ ID NO: 127187 - protein, 10 aa, synthetic construct
TLSRGDRGVV

SEQ ID NO: 127188 - protein, 10 aa, synthetic construct
TLTRGDRGVV

SEQ ID NO: 127189 - protein, 10 aa, synthetic construct
TLYRGDRGVV

SEQ ID NO: 127190 - protein, 10 aa, synthetic construct
TLNRGDRGVV

SEQ ID NO: 127191 - protein, 10 aa, synthetic construct
TLQRGDRGVV

SEQ ID NO: 127192 - protein, 10 aa, synthetic construct
TLDRGDRGVV

SEQ ID NO: 127193 - protein, 10 aa, synthetic construct
TLERGDRGVV

SEQ ID NO: 127194 - protein, 10 aa, synthetic construct
TIGRGDRGVV

SEQ ID NO: 127195 - protein, 10 aa, synthetic construct
TIARGDRGVV

SEQ ID NO: 127196 - protein, 10 aa, synthetic construct
TIVRGDRGVV

SEQ ID NO: 127197 - protein, 10 aa, synthetic construct
TIPRGDRGVV

SEQ ID NO: 127198 - protein, 10 aa, synthetic construct
TILRGDRGVV

SEQ ID NO: 127199 - protein, 10 aa, synthetic construct
TIIRGDRGVV

SEQ ID NO: 127200 - protein, 10 aa, synthetic construct
TIMRGDRGVV

SEQ ID NO: 127201 - protein, 10 aa, synthetic construct
TIWRGDRGVV

SEQ ID NO: 127202 - protein, 10 aa, synthetic construct
TIFRGDRGVV

SEQ ID NO: 127203 - protein, 10 aa, synthetic construct
TIKRGDRGVV

SEQ ID NO: 127204 - protein, 10 aa, synthetic construct
TIRRGDRGVV

SEQ ID NO: 127205 - protein, 10 aa, synthetic construct
TIHRGDRGVV

SEQ ID NO: 127206 - protein, 10 aa, synthetic construct
TISRGDRGVV

SEQ ID NO: 127207 - protein, 10 aa, synthetic construct
TITRGDRGVV

SEQ ID NO: 127208 - protein, 10 aa, synthetic construct
TIYRGDRGVV

SEQ ID NO: 127209 - protein, 10 aa, synthetic construct
TINRGDRGVV

SEQ ID NO: 127210 - protein, 10 aa, synthetic construct
TIQRGDRGVV

SEQ ID NO: 127211 - protein, 10 aa, synthetic construct
TIDRGDRGVV

SEQ ID NO: 127212 - protein, 10 aa, synthetic construct
TIERGDRGVV

SEQ ID NO: 127213 - protein, 10 aa, synthetic construct
TMGRGDRGVV

SEQ ID NO: 127214 - protein, 10 aa, synthetic construct
TMARGDRGVV

SEQ ID NO: 127215 - protein, 10 aa, synthetic construct
TMVRGDRGVV

SEQ ID NO: 127216 - protein, 10 aa, synthetic construct
TMPRGDRGVV

SEQ ID NO: 127217 - protein, 10 aa, synthetic construct
TMLRGDRGVV

SEQ ID NO: 127218 - protein, 10 aa, synthetic construct
TMIRGDRGVV

SEQ ID NO: 127219 - protein, 10 aa, synthetic construct
TMMRGDRGVV

SEQ ID NO: 127220 - protein, 10 aa, synthetic construct
TMWRGDRGVV

SEQ ID NO: 127221 - protein, 10 aa, synthetic construct
TMFRGDRGVV

SEQ ID NO: 127222 - protein, 10 aa, synthetic construct
TMKRGDRGVV

SEQ ID NO: 127223 - protein, 10 aa, synthetic construct
TMRRGDRGVV

SEQ ID NO: 127224 - protein, 10 aa, synthetic construct
TMHRGDRGVV

SEQ ID NO: 127225 - protein, 10 aa, synthetic construct
TMSRGDRGVV

SEQ ID NO: 127226 - protein, 10 aa, synthetic construct
TMTRGDRGVV

SEQ ID NO: 127227 - protein, 10 aa, synthetic construct
TMYRGDRGVV

SEQ ID NO: 127228 - protein, 10 aa, synthetic construct
TMNRGDRGVV

SEQ ID NO: 127229 - protein, 10 aa, synthetic construct
TMQRGDRGVV

SEQ ID NO: 127230 - protein, 10 aa, synthetic construct
TMDRGDRGVV

SEQ ID NO: 127231 - protein, 10 aa, synthetic construct
TMERGDRGVV

SEQ ID NO: 127232 - protein, 10 aa, synthetic construct
TWGRGDRGVV

SEQ ID NO: 127233 - protein, 10 aa, synthetic construct
TWARGDRGVV

SEQ ID NO: 127234 - protein, 10 aa, synthetic construct
TWVRGDRGVV

SEQ ID NO: 127235 - protein, 10 aa, synthetic construct
TWPRGDRGVV

SEQ ID NO: 127236 - protein, 10 aa, synthetic construct
TWLRGDRGVV

SEQ ID NO: 127237 - protein, 10 aa, synthetic construct
TWIRGDRGVV

SEQ ID NO: 127238 - protein, 10 aa, synthetic construct
TWMRGDRGVV

SEQ ID NO: 127239 - protein, 10 aa, synthetic construct
TWWRGDRGVV

SEQ ID NO: 127240 - protein, 10 aa, synthetic construct
TWFRGDRGVV

SEQ ID NO: 127241 - protein, 10 aa, synthetic construct
TWKRGDRGVV

SEQ ID NO: 127242 - protein, 10 aa, synthetic construct
TWRRGDRGVV

SEQ ID NO: 127243 - protein, 10 aa, synthetic construct
TWHRGDRGVV

SEQ ID NO: 127244 - protein, 10 aa, synthetic construct
TWSRGDRGVV

SEQ ID NO: 127245 - protein, 10 aa, synthetic construct
TWTRGDRGVV

SEQ ID NO: 127246 - protein, 10 aa, synthetic construct
TWYRGDRGVV

SEQ ID NO: 127247 - protein, 10 aa, synthetic construct
TWNRGDRGVV

SEQ ID NO: 127248 - protein, 10 aa, synthetic construct
TWQRGDRGVV

SEQ ID NO: 127249 - protein, 10 aa, synthetic construct
TWDRGDRGVV

SEQ ID NO: 127250 - protein, 10 aa, synthetic construct
TWERGDRGVV

SEQ ID NO: 127251 - protein, 10 aa, synthetic construct
TFGRGDRGVV

SEQ ID NO: 127252 - protein, 10 aa, synthetic construct
TFARGDRGVV

SEQ ID NO: 127253 - protein, 10 aa, synthetic construct
TFVRGDRGVV

SEQ ID NO: 127254 - protein, 10 aa, synthetic construct
TFPRGDRGVV

SEQ ID NO: 127255 - protein, 10 aa, synthetic construct
TFLRGDRGVV

SEQ ID NO: 127256 - protein, 10 aa, synthetic construct
TFIRGDRGVV

SEQ ID NO: 127257 - protein, 10 aa, synthetic construct
TFMRGDRGVV

SEQ ID NO: 127258 - protein, 10 aa, synthetic construct
TFWRGDRGVV

SEQ ID NO: 127259 - protein, 10 aa, synthetic construct
TFFRGDRGVV

SEQ ID NO: 127260 - protein, 10 aa, synthetic construct
TFKRGDRGVV

SEQ ID NO: 127261 - protein, 10 aa, synthetic construct
TFRRGDRGVV

SEQ ID NO: 127262 - protein, 10 aa, synthetic construct
TFHRGDRGVV

SEQ ID NO: 127263 - protein, 10 aa, synthetic construct
TFSRGDRGVV

SEQ ID NO: 127264 - protein, 10 aa, synthetic construct
TFTRGDRGVV

SEQ ID NO: 127265 - protein, 10 aa, synthetic construct
TFYRGDRGVV

SEQ ID NO: 127266 - protein, 10 aa, synthetic construct
TFNRGDRGVV

SEQ ID NO: 127267 - protein, 10 aa, synthetic construct
TFQRGDRGVV

SEQ ID NO: 127268 - protein, 10 aa, synthetic construct
TFDRGDRGVV

SEQ ID NO: 127269 - protein, 10 aa, synthetic construct
TFERGDRGVV

SEQ ID NO: 127270 - protein, 10 aa, synthetic construct
TKGRGDRGVV

SEQ ID NO: 127271 - protein, 10 aa, synthetic construct
TKARGDRGVV

SEQ ID NO: 127272 - protein, 10 aa, synthetic construct
TKVRGDRGVV

SEQ ID NO: 127273 - protein, 10 aa, synthetic construct
TKPRGDRGVV

SEQ ID NO: 127274 - protein, 10 aa, synthetic construct
TKLRGDRGVV

SEQ ID NO: 127275 - protein, 10 aa, synthetic construct
TKIRGDRGVV

SEQ ID NO: 127276 - protein, 10 aa, synthetic construct
TKMRGDRGVV

SEQ ID NO: 127277 - protein, 10 aa, synthetic construct
TKWRGDRGVV

SEQ ID NO: 127278 - protein, 10 aa, synthetic construct
TKFRGDRGVV

SEQ ID NO: 127279 - protein, 10 aa, synthetic construct
TKKRGDRGVV

SEQ ID NO: 127280 - protein, 10 aa, synthetic construct
TKRRGDRGVV

SEQ ID NO: 127281 - protein, 10 aa, synthetic construct
TKHRGDRGVV

SEQ ID NO: 127282 - protein, 10 aa, synthetic construct
TKSRGDRGVV

SEQ ID NO: 127283 - protein, 10 aa, synthetic construct
TKTRGDRGVV

SEQ ID NO: 127284 - protein, 10 aa, synthetic construct
TKYRGDRGVV

SEQ ID NO: 127285 - protein, 10 aa, synthetic construct
TKNRGDRGVV

SEQ ID NO: 127286 - protein, 10 aa, synthetic construct
TKQRGDRGVV

SEQ ID NO: 127287 - protein, 10 aa, synthetic construct
TKDRGDRGVV

SEQ ID NO: 127288 - protein, 10 aa, synthetic construct
TKERGDRGVV

SEQ ID NO: 127289 - protein, 10 aa, synthetic construct
TRGRGDRGVV

SEQ ID NO: 127290 - protein, 10 aa, synthetic construct
TRARGDRGVV

SEQ ID NO: 127291 - protein, 10 aa, synthetic construct
TRVRGDRGVV

SEQ ID NO: 127292 - protein, 10 aa, synthetic construct
TRPRGDRGVV

SEQ ID NO: 127293 - protein, 10 aa, synthetic construct
TRLRGDRGVV

SEQ ID NO: 127294 - protein, 10 aa, synthetic construct
TRIRGDRGVV

SEQ ID NO: 127295 - protein, 10 aa, synthetic construct
TRMRGDRGVV

SEQ ID NO: 127296 - protein, 10 aa, synthetic construct
TRWRGDRGVV

SEQ ID NO: 127297 - protein, 10 aa, synthetic construct
TRFRGDRGVV

SEQ ID NO: 127298 - protein, 10 aa, synthetic construct
TRKRGDRGVV

SEQ ID NO: 127299 - protein, 10 aa, synthetic construct
TRRRGDRGVV

SEQ ID NO: 127300 - protein, 10 aa, synthetic construct
TRHRGDRGVV

SEQ ID NO: 127301 - protein, 10 aa, synthetic construct
TRSRGDRGVV

SEQ ID NO: 127302 - protein, 10 aa, synthetic construct
TRTRGDRGVV

SEQ ID NO: 127303 - protein, 10 aa, synthetic construct
TRYRGDRGVV

SEQ ID NO: 127304 - protein, 10 aa, synthetic construct
TRNRGDRGVV

SEQ ID NO: 127305 - protein, 10 aa, synthetic construct
TRQRGDRGVV

SEQ ID NO: 127306 - protein, 10 aa, synthetic construct
TRDRGDRGVV

SEQ ID NO: 127307 - protein, 10 aa, synthetic construct
TRERGDRGVV

SEQ ID NO: 127308 - protein, 10 aa, synthetic construct
THGRGDRGVV

SEQ ID NO: 127309 - protein, 10 aa, synthetic construct
THARGDRGVV

SEQ ID NO: 127310 - protein, 10 aa, synthetic construct
THVRGDRGVV

SEQ ID NO: 127311 - protein, 10 aa, synthetic construct
THPRGDRGVV

SEQ ID NO: 127312 - protein, 10 aa, synthetic construct
THLRGDRGVV

SEQ ID NO: 127313 - protein, 10 aa, synthetic construct
THIRGDRGVV

SEQ ID NO: 127314 - protein, 10 aa, synthetic construct
THMRGDRGVV

SEQ ID NO: 127315 - protein, 10 aa, synthetic construct
THWRGDRGVV

SEQ ID NO: 127316 - protein, 10 aa, synthetic construct
THFRGDRGVV

SEQ ID NO: 127317 - protein, 10 aa, synthetic construct
THKRGDRGVV

SEQ ID NO: 127318 - protein, 10 aa, synthetic construct
THRRGDRGVV

SEQ ID NO: 127319 - protein, 10 aa, synthetic construct
THHRGDRGVV

SEQ ID NO: 127320 - protein, 10 aa, synthetic construct
THSRGDRGVV

SEQ ID NO: 127321 - protein, 10 aa, synthetic construct
THTRGDRGVV

SEQ ID NO: 127322 - protein, 10 aa, synthetic construct
THYRGDRGVV

SEQ ID NO: 127323 - protein, 10 aa, synthetic construct
THNRGDRGVV

SEQ ID NO: 127324 - protein, 10 aa, synthetic construct
THQRGDRGVV

SEQ ID NO: 127325 - protein, 10 aa, synthetic construct
THDRGDRGVV

SEQ ID NO: 127326 - protein, 10 aa, synthetic construct
THERGDRGVV

SEQ ID NO: 127327 - protein, 10 aa, synthetic construct
TSGRGDRGVV

SEQ ID NO: 127328 - protein, 10 aa, synthetic construct
TSARGDRGVV

SEQ ID NO: 127329 - protein, 10 aa, synthetic construct
TSVRGDRGVV

SEQ ID NO: 127330 - protein, 10 aa, synthetic construct
TSPRGDRGVV

SEQ ID NO: 127331 - protein, 10 aa, synthetic construct
TSLRGDRGVV

SEQ ID NO: 127332 - protein, 10 aa, synthetic construct
TSIRGDRGVV

SEQ ID NO: 127333 - protein, 10 aa, synthetic construct
TSMRGDRGVV

SEQ ID NO: 127334 - protein, 10 aa, synthetic construct
TSWRGDRGVV

SEQ ID NO: 127335 - protein, 10 aa, synthetic construct
TSFRGDRGVV

SEQ ID NO: 127336 - protein, 10 aa, synthetic construct
TSKRGDRGVV

SEQ ID NO: 127337 - protein, 10 aa, synthetic construct
TSRRGDRGVV

SEQ ID NO: 127338 - protein, 10 aa, synthetic construct
TSHRGDRGVV

SEQ ID NO: 127339 - protein, 10 aa, synthetic construct
TSSRGDRGVV

SEQ ID NO: 127340 - protein, 10 aa, synthetic construct
TSTRGDRGVV

SEQ ID NO: 127341 - protein, 10 aa, synthetic construct
TSYRGDRGVV

SEQ ID NO: 127342 - protein, 10 aa, synthetic construct
TSNRGDRGVV

SEQ ID NO: 127343 - protein, 10 aa, synthetic construct
TSQRGDRGVV

SEQ ID NO: 127344 - protein, 10 aa, synthetic construct
TSDRGDRGVV

SEQ ID NO: 127345 - protein, 10 aa, synthetic construct
TSERGDRGVV

SEQ ID NO: 127346 - protein, 10 aa, synthetic construct
TTGRGDRGVV

SEQ ID NO: 127347 - protein, 10 aa, synthetic construct
TTARGDRGVV

SEQ ID NO: 127348 - protein, 10 aa, synthetic construct
TTVRGDRGVV

SEQ ID NO: 127349 - protein, 10 aa, synthetic construct
TTPRGDRGVV

SEQ ID NO: 127350 - protein, 10 aa, synthetic construct
TTLRGDRGVV

SEQ ID NO: 127351 - protein, 10 aa, synthetic construct
TTIRGDRGVV

SEQ ID NO: 127352 - protein, 10 aa, synthetic construct
TTMRGDRGVV

SEQ ID NO: 127353 - protein, 10 aa, synthetic construct
TTWRGDRGVV

SEQ ID NO: 127354 - protein, 10 aa, synthetic construct
TTFRGDRGVV

SEQ ID NO: 127355 - protein, 10 aa, synthetic construct
TTKRGDRGVV

SEQ ID NO: 127356 - protein, 10 aa, synthetic construct
TTRRGDRGVV

SEQ ID NO: 127357 - protein, 10 aa, synthetic construct
TTHRGDRGVV

SEQ ID NO: 127358 - protein, 10 aa, synthetic construct
TTSRGDRGVV

SEQ ID NO: 127359 - protein, 10 aa, synthetic construct
TTTRGDRGVV

SEQ ID NO: 127360 - protein, 10 aa, synthetic construct
TTYRGDRGVV

SEQ ID NO: 127361 - protein, 10 aa, synthetic construct
TTNRGDRGVV

SEQ ID NO: 127362 - protein, 10 aa, synthetic construct
TTQRGDRGVV

SEQ ID NO: 127363 - protein, 10 aa, synthetic construct
TTDRGDRGVV

SEQ ID NO: 127364 - protein, 10 aa, synthetic construct
TTERGDRGVV

SEQ ID NO: 127365 - protein, 10 aa, synthetic construct
TYGRGDRGVV

SEQ ID NO: 127366 - protein, 10 aa, synthetic construct
TYARGDRGVV

SEQ ID NO: 127367 - protein, 10 aa, synthetic construct
TYVRGDRGVV

SEQ ID NO: 127368 - protein, 10 aa, synthetic construct
TYPRGDRGVV

SEQ ID NO: 127369 - protein, 10 aa, synthetic construct
TYLRGDRGVV

SEQ ID NO: 127370 - protein, 10 aa, synthetic construct
TYIRGDRGVV

SEQ ID NO: 127371 - protein, 10 aa, synthetic construct
TYMRGDRGVV

SEQ ID NO: 127372 - protein, 10 aa, synthetic construct
TYWRGDRGVV

SEQ ID NO: 127373 - protein, 10 aa, synthetic construct
TYFRGDRGVV

SEQ ID NO: 127374 - protein, 10 aa, synthetic construct
TYKRGDRGVV

SEQ ID NO: 127375 - protein, 10 aa, synthetic construct
TYRRGDRGVV

SEQ ID NO: 127376 - protein, 10 aa, synthetic construct
TYHRGDRGVV

SEQ ID NO: 127377 - protein, 10 aa, synthetic construct
TYSRGDRGVV

SEQ ID NO: 127378 - protein, 10 aa, synthetic construct
TYTRGDRGVV

SEQ ID NO: 127379 - protein, 10 aa, synthetic construct
TYYRGDRGVV

SEQ ID NO: 127380 - protein, 10 aa, synthetic construct
TYNRGDRGVV

SEQ ID NO: 127381 - protein, 10 aa, synthetic construct
TYQRGDRGVV

SEQ ID NO: 127382 - protein, 10 aa, synthetic construct
TYDRGDRGVV

SEQ ID NO: 127383 - protein, 10 aa, synthetic construct
TYERGDRGVV

SEQ ID NO: 127384 - protein, 10 aa, synthetic construct
TNGRGDRGVV

SEQ ID NO: 127385 - protein, 10 aa, synthetic construct
TNARGDRGVV

SEQ ID NO: 127386 - protein, 10 aa, synthetic construct
TNVRGDRGVV

SEQ ID NO: 127387 - protein, 10 aa, synthetic construct
TNPRGDRGVV

SEQ ID NO: 127388 - protein, 10 aa, synthetic construct
TNLRGDRGVV

SEQ ID NO: 127389 - protein, 10 aa, synthetic construct
TNIRGDRGVV

SEQ ID NO: 127390 - protein, 10 aa, synthetic construct
TNMRGDRGVV

SEQ ID NO: 127391 - protein, 10 aa, synthetic construct
TNWRGDRGVV

SEQ ID NO: 127392 - protein, 10 aa, synthetic construct
TNFRGDRGVV

SEQ ID NO: 127393 - protein, 10 aa, synthetic construct
TNKRGDRGVV

SEQ ID NO: 127394 - protein, 10 aa, synthetic construct
TNRRGDRGVV

SEQ ID NO: 127395 - protein, 10 aa, synthetic construct
TNHRGDRGVV

SEQ ID NO: 127396 - protein, 10 aa, synthetic construct
TNSRGDRGVV

SEQ ID NO: 127397 - protein, 10 aa, synthetic construct
TNTRGDRGVV

SEQ ID NO: 127398 - protein, 10 aa, synthetic construct
TNYRGDRGVV

SEQ ID NO: 127399 - protein, 10 aa, synthetic construct
TNNRGDRGVV

SEQ ID NO: 127400 - protein, 10 aa, synthetic construct
TNQRGDRGVV

SEQ ID NO: 127401 - protein, 10 aa, synthetic construct
TNDRGDRGVV

SEQ ID NO: 127402 - protein, 10 aa, synthetic construct
TNERGDRGVV

SEQ ID NO: 127403 - protein, 10 aa, synthetic construct
TQGRGDRGVV

SEQ ID NO: 127404 - protein, 10 aa, synthetic construct
TQARGDRGVV

SEQ ID NO: 127405 - protein, 10 aa, synthetic construct
TQVRGDRGVV

SEQ ID NO: 127406 - protein, 10 aa, synthetic construct
TQPRGDRGVV

SEQ ID NO: 127407 - protein, 10 aa, synthetic construct
TQLRGDRGVV

SEQ ID NO: 127408 - protein, 10 aa, synthetic construct
TQIRGDRGVV

SEQ ID NO: 127409 - protein, 10 aa, synthetic construct
TQMRGDRGVV

SEQ ID NO: 127410 - protein, 10 aa, synthetic construct
TQWRGDRGVV

SEQ ID NO: 127411 - protein, 10 aa, synthetic construct
TQFRGDRGVV

SEQ ID NO: 127412 - protein, 10 aa, synthetic construct
TQKRGDRGVV

SEQ ID NO: 127413 - protein, 10 aa, synthetic construct
TQRRGDRGVV

SEQ ID NO: 127414 - protein, 10 aa, synthetic construct
TQHRGDRGVV

SEQ ID NO: 127415 - protein, 10 aa, synthetic construct
TQSRGDRGVV

SEQ ID NO: 127416 - protein, 10 aa, synthetic construct
TQTRGDRGVV

SEQ ID NO: 127417 - protein, 10 aa, synthetic construct
TQYRGDRGVV

SEQ ID NO: 127418 - protein, 10 aa, synthetic construct
TQNRGDRGVV

SEQ ID NO: 127419 - protein, 10 aa, synthetic construct
TQQRGDRGVV

SEQ ID NO: 127420 - protein, 10 aa, synthetic construct
TQDRGDRGVV

SEQ ID NO: 127421 - protein, 10 aa, synthetic construct
TQERGDRGVV

SEQ ID NO: 127422 - protein, 10 aa, synthetic construct
TDGRGDRGVV

SEQ ID NO: 127423 - protein, 10 aa, synthetic construct
TDARGDRGVV

SEQ ID NO: 127424 - protein, 10 aa, synthetic construct
TDVRGDRGVV

SEQ ID NO: 127425 - protein, 10 aa, synthetic construct
TDPRGDRGVV

SEQ ID NO: 127426 - protein, 10 aa, synthetic construct
TDLRGDRGVV

SEQ ID NO: 127427 - protein, 10 aa, synthetic construct
TDIRGDRGVV

SEQ ID NO: 127428 - protein, 10 aa, synthetic construct
TDMRGDRGVV

SEQ ID NO: 127429 - protein, 10 aa, synthetic construct
TDWRGDRGVV

SEQ ID NO: 127430 - protein, 10 aa, synthetic construct
TDFRGDRGVV

SEQ ID NO: 127431 - protein, 10 aa, synthetic construct
TDKRGDRGVV

SEQ ID NO: 127432 - protein, 10 aa, synthetic construct
TDRRGDRGVV

SEQ ID NO: 127433 - protein, 10 aa, synthetic construct
TDHRGDRGVV

SEQ ID NO: 127434 - protein, 10 aa, synthetic construct
TDSRGDRGVV

SEQ ID NO: 127435 - protein, 10 aa, synthetic construct
TDTRGDRGVV

SEQ ID NO: 127436 - protein, 10 aa, synthetic construct
TDYRGDRGVV

SEQ ID NO: 127437 - protein, 10 aa, synthetic construct
TDNRGDRGVV

SEQ ID NO: 127438 - protein, 10 aa, synthetic construct
TDQRGDRGVV

SEQ ID NO: 127439 - protein, 10 aa, synthetic construct
TDDRGDRGVV

SEQ ID NO: 127440 - protein, 10 aa, synthetic construct
TDERGDRGVV

SEQ ID NO: 127441 - protein, 10 aa, synthetic construct
TEGRGDRGVV

SEQ ID NO: 127442 - protein, 10 aa, synthetic construct
TEARGDRGVV

SEQ ID NO: 127443 - protein, 10 aa, synthetic construct
TEVRGDRGVV

SEQ ID NO: 127444 - protein, 10 aa, synthetic construct
TEPRGDRGVV

SEQ ID NO: 127445 - protein, 10 aa, synthetic construct
TELRGDRGVV

SEQ ID NO: 127446 - protein, 10 aa, synthetic construct
TEIRGDRGVV

SEQ ID NO: 127447 - protein, 10 aa, synthetic construct
TEMRGDRGVV

SEQ ID NO: 127448 - protein, 10 aa, synthetic construct
TEWRGDRGVV

SEQ ID NO: 127449 - protein, 10 aa, synthetic construct
TEFRGDRGVV

SEQ ID NO: 127450 - protein, 10 aa, synthetic construct
TEKRGDRGVV

SEQ ID NO: 127451 - protein, 10 aa, synthetic construct
TERRGDRGVV

SEQ ID NO: 127452 - protein, 10 aa, synthetic construct
TEHRGDRGVV

SEQ ID NO: 127453 - protein, 10 aa, synthetic construct
TESRGDRGVV

SEQ ID NO: 127454 - protein, 10 aa, synthetic construct
TETRGDRGVV

SEQ ID NO: 127455 - protein, 10 aa, synthetic construct
TEYRGDRGVV

SEQ ID NO: 127456 - protein, 10 aa, synthetic construct
TENRGDRGVV

SEQ ID NO: 127457 - protein, 10 aa, synthetic construct
TEQRGDRGVV

SEQ ID NO: 127458 - protein, 10 aa, synthetic construct
TEDRGDRGVV

SEQ ID NO: 127459 - protein, 10 aa, synthetic construct
TEERGDRGVV

SEQ ID NO: 127460 - protein, 10 aa, synthetic construct
AGGRGDRGVV

SEQ ID NO: 127461 - protein, 10 aa, synthetic construct
AGARGDRGVV

SEQ ID NO: 127462 - protein, 10 aa, synthetic construct
AGVRGDRGVV

SEQ ID NO: 127463 - protein, 10 aa, synthetic construct
AGPRGDRGVV

SEQ ID NO: 127464 - protein, 10 aa, synthetic construct
AGLRGDRGVV

SEQ ID NO: 127465 - protein, 10 aa, synthetic construct
AGIRGDRGVV

SEQ ID NO: 127466 - protein, 10 aa, synthetic construct
AGMRGDRGVV

SEQ ID NO: 127467 - protein, 10 aa, synthetic construct
AGWRGDRGVV

SEQ ID NO: 127468 - protein, 10 aa, synthetic construct
AGFRGDRGVV

SEQ ID NO: 127469 - protein, 10 aa, synthetic construct
AGKRGDRGVV

SEQ ID NO: 127470 - protein, 10 aa, synthetic construct
AGRRGDRGVV

SEQ ID NO: 127471 - protein, 10 aa, synthetic construct
AGHRGDRGVV

SEQ ID NO: 127472 - protein, 10 aa, synthetic construct
AGSRGDRGVV

SEQ ID NO: 127473 - protein, 10 aa, synthetic construct
AGTRGDRGVV

SEQ ID NO: 127474 - protein, 10 aa, synthetic construct
AGYRGDRGVV

SEQ ID NO: 127475 - protein, 10 aa, synthetic construct
AGNRGDRGVV

SEQ ID NO: 127476 - protein, 10 aa, synthetic construct
AGQRGDRGVV

SEQ ID NO: 127477 - protein, 10 aa, synthetic construct
AGDRGDRGVV

SEQ ID NO: 127478 - protein, 10 aa, synthetic construct
AGERGDRGVV

SEQ ID NO: 127479 - protein, 10 aa, synthetic construct
AAGRGDRGVV

SEQ ID NO: 127480 - protein, 10 aa, synthetic construct
AAARGDRGVV

SEQ ID NO: 127481 - protein, 10 aa, synthetic construct
AAVRGDRGVV

SEQ ID NO: 127482 - protein, 10 aa, synthetic construct
AAPRGDRGVV

SEQ ID NO: 127483 - protein, 10 aa, synthetic construct
AALRGDRGVV

SEQ ID NO: 127484 - protein, 10 aa, synthetic construct
AAIRGDRGVV

SEQ ID NO: 127485 - protein, 10 aa, synthetic construct
AAMRGDRGVV

SEQ ID NO: 127486 - protein, 10 aa, synthetic construct
AAWRGDRGVV

SEQ ID NO: 127487 - protein, 10 aa, synthetic construct
AAFRGDRGVV

SEQ ID NO: 127488 - protein, 10 aa, synthetic construct
AAKRGDRGVV

SEQ ID NO: 127489 - protein, 10 aa, synthetic construct
AARRGDRGVV

SEQ ID NO: 127490 - protein, 10 aa, synthetic construct
AAHRGDRGVV

SEQ ID NO: 127491 - protein, 10 aa, synthetic construct
AASRGDRGVV

SEQ ID NO: 127492 - protein, 10 aa, synthetic construct
AATRGDRGVV

SEQ ID NO: 127493 - protein, 10 aa, synthetic construct
AAYRGDRGVV

SEQ ID NO: 127494 - protein, 10 aa, synthetic construct
AANRGDRGVV

SEQ ID NO: 127495 - protein, 10 aa, synthetic construct
AAQRGDRGVV

SEQ ID NO: 127496 - protein, 10 aa, synthetic construct
AADRGDRGVV

SEQ ID NO: 127497 - protein, 10 aa, synthetic construct
AAERGDRGVV

SEQ ID NO: 127498 - protein, 10 aa, synthetic construct
AVGRGDRGVV

SEQ ID NO: 127499 - protein, 10 aa, synthetic construct
AVARGDRGVV

SEQ ID NO: 127500 - protein, 10 aa, synthetic construct
AVVRGDRGVV

SEQ ID NO: 127501 - protein, 10 aa, synthetic construct
AVPRGDRGVV

SEQ ID NO: 127502 - protein, 10 aa, synthetic construct
AVLRGDRGVV

SEQ ID NO: 127503 - protein, 10 aa, synthetic construct
AVIRGDRGVV

SEQ ID NO: 127504 - protein, 10 aa, synthetic construct
AVMRGDRGVV

SEQ ID NO: 127505 - protein, 10 aa, synthetic construct
AVWRGDRGVV

SEQ ID NO: 127506 - protein, 10 aa, synthetic construct
AVFRGDRGVV

SEQ ID NO: 127507 - protein, 10 aa, synthetic construct
AVKRGDRGVV

SEQ ID NO: 127508 - protein, 10 aa, synthetic construct
AVRRGDRGVV

SEQ ID NO: 127509 - protein, 10 aa, synthetic construct
AVHRGDRGVV

SEQ ID NO: 127510 - protein, 10 aa, synthetic construct
AVSRGDRGVV

SEQ ID NO: 127511 - protein, 10 aa, synthetic construct
AVTRGDRGVV

SEQ ID NO: 127512 - protein, 10 aa, synthetic construct
AVYRGDRGVV

SEQ ID NO: 127513 - protein, 10 aa, synthetic construct
AVNRGDRGVV

SEQ ID NO: 127514 - protein, 10 aa, synthetic construct
AVQRGDRGVV

SEQ ID NO: 127515 - protein, 10 aa, synthetic construct
AVDRGDRGVV

SEQ ID NO: 127516 - protein, 10 aa, synthetic construct
AVERGDRGVV

SEQ ID NO: 127517 - protein, 10 aa, synthetic construct
APGRGDRGVV

SEQ ID NO: 127518 - protein, 10 aa, synthetic construct
APARGDRGVV

SEQ ID NO: 127519 - protein, 10 aa, synthetic construct
APVRGDRGVV

SEQ ID NO: 127520 - protein, 10 aa, synthetic construct
APPRGDRGVV

SEQ ID NO: 127521 - protein, 10 aa, synthetic construct
APLRGDRGVV

SEQ ID NO: 127522 - protein, 10 aa, synthetic construct
APIRGDRGVV

SEQ ID NO: 127523 - protein, 10 aa, synthetic construct
APMRGDRGVV

SEQ ID NO: 127524 - protein, 10 aa, synthetic construct
APWRGDRGVV

SEQ ID NO: 127525 - protein, 10 aa, synthetic construct
APFRGDRGVV

SEQ ID NO: 127526 - protein, 10 aa, synthetic construct
APKRGDRGVV

SEQ ID NO: 127527 - protein, 10 aa, synthetic construct
APRRGDRGVV

SEQ ID NO: 127528 - protein, 10 aa, synthetic construct
APHRGDRGVV

SEQ ID NO: 127529 - protein, 10 aa, synthetic construct
APSRGDRGVV

SEQ ID NO: 127530 - protein, 10 aa, synthetic construct
APTRGDRGVV

SEQ ID NO: 127531 - protein, 10 aa, synthetic construct
APYRGDRGVV

SEQ ID NO: 127532 - protein, 10 aa, synthetic construct
APNRGDRGVV

SEQ ID NO: 127533 - protein, 10 aa, synthetic construct
APQRGDRGVV

SEQ ID NO: 127534 - protein, 10 aa, synthetic construct
APDRGDRGVV

SEQ ID NO: 127535 - protein, 10 aa, synthetic construct
APERGDRGVV

SEQ ID NO: 127536 - protein, 10 aa, synthetic construct
ALGRGDRGVV

SEQ ID NO: 127537 - protein, 10 aa, synthetic construct
ALARGDRGVV

SEQ ID NO: 127538 - protein, 10 aa, synthetic construct
ALVRGDRGVV

SEQ ID NO: 127539 - protein, 10 aa, synthetic construct
ALPRGDRGVV

SEQ ID NO: 127540 - protein, 10 aa, synthetic construct
ALLRGDRGVV

SEQ ID NO: 127541 - protein, 10 aa, synthetic construct
ALIRGDRGVV

SEQ ID NO: 127542 - protein, 10 aa, synthetic construct
ALMRGDRGVV

SEQ ID NO: 127543 - protein, 10 aa, synthetic construct
ALWRGDRGVV

SEQ ID NO: 127544 - protein, 10 aa, synthetic construct
ALFRGDRGVV

SEQ ID NO: 127545 - protein, 10 aa, synthetic construct
ALKRGDRGVV

SEQ ID NO: 127546 - protein, 10 aa, synthetic construct
ALRRGDRGVV

SEQ ID NO: 127547 - protein, 10 aa, synthetic construct
ALHRGDRGVV

SEQ ID NO: 127548 - protein, 10 aa, synthetic construct
ALSRGDRGVV

SEQ ID NO: 127549 - protein, 10 aa, synthetic construct
ALTRGDRGVV

SEQ ID NO: 127550 - protein, 10 aa, synthetic construct
ALYRGDRGVV

SEQ ID NO: 127551 - protein, 10 aa, synthetic construct
ALNRGDRGVV

SEQ ID NO: 127552 - protein, 10 aa, synthetic construct
ALQRGDRGVV

SEQ ID NO: 127553 - protein, 10 aa, synthetic construct
ALDRGDRGVV

SEQ ID NO: 127554 - protein, 10 aa, synthetic construct
ALERGDRGVV

SEQ ID NO: 127555 - protein, 10 aa, synthetic construct
AIGRGDRGVV

SEQ ID NO: 127556 - protein, 10 aa, synthetic construct
AIARGDRGVV

SEQ ID NO: 127557 - protein, 10 aa, synthetic construct
AIVRGDRGVV

SEQ ID NO: 127558 - protein, 10 aa, synthetic construct
AIPRGDRGVV

SEQ ID NO: 127559 - protein, 10 aa, synthetic construct
AILRGDRGVV

SEQ ID NO: 127560 - protein, 10 aa, synthetic construct
AIIRGDRGVV

SEQ ID NO: 127561 - protein, 10 aa, synthetic construct
AIMRGDRGVV

SEQ ID NO: 127562 - protein, 10 aa, synthetic construct
AIWRGDRGVV

SEQ ID NO: 127563 - protein, 10 aa, synthetic construct
AIFRGDRGVV

SEQ ID NO: 127564 - protein, 10 aa, synthetic construct
AIKRGDRGVV

SEQ ID NO: 127565 - protein, 10 aa, synthetic construct
AIRRGDRGVV

SEQ ID NO: 127566 - protein, 10 aa, synthetic construct
AIHRGDRGVV

SEQ ID NO: 127567 - protein, 10 aa, synthetic construct
AISRGDRGVV

SEQ ID NO: 127568 - protein, 10 aa, synthetic construct
AITRGDRGVV

SEQ ID NO: 127569 - protein, 10 aa, synthetic construct
AIYRGDRGVV

SEQ ID NO: 127570 - protein, 10 aa, synthetic construct
AINRGDRGVV

SEQ ID NO: 127571 - protein, 10 aa, synthetic construct
AIQRGDRGVV

SEQ ID NO: 127572 - protein, 10 aa, synthetic construct
AIDRGDRGVV

SEQ ID NO: 127573 - protein, 10 aa, synthetic construct
AIERGDRGVV

SEQ ID NO: 127574 - protein, 10 aa, synthetic construct
AMGRGDRGVV

SEQ ID NO: 127575 - protein, 10 aa, synthetic construct
AMARGDRGVV

SEQ ID NO: 127576 - protein, 10 aa, synthetic construct
AMVRGDRGVV

SEQ ID NO: 127577 - protein, 10 aa, synthetic construct
AMPRGDRGVV

SEQ ID NO: 127578 - protein, 10 aa, synthetic construct
AMLRGDRGVV

SEQ ID NO: 127579 - protein, 10 aa, synthetic construct
AMIRGDRGVV

SEQ ID NO: 127580 - protein, 10 aa, synthetic construct
AMMRGDRGVV

SEQ ID NO: 127581 - protein, 10 aa, synthetic construct
AMWRGDRGVV

SEQ ID NO: 127582 - protein, 10 aa, synthetic construct
AMFRGDRGVV

SEQ ID NO: 127583 - protein, 10 aa, synthetic construct
AMKRGDRGVV

SEQ ID NO: 127584 - protein, 10 aa, synthetic construct
AMRRGDRGVV

SEQ ID NO: 127585 - protein, 10 aa, synthetic construct
AMHRGDRGVV

SEQ ID NO: 127586 - protein, 10 aa, synthetic construct
AMSRGDRGVV

SEQ ID NO: 127587 - protein, 10 aa, synthetic construct
AMTRGDRGVV

SEQ ID NO: 127588 - protein, 10 aa, synthetic construct
AMYRGDRGVV

SEQ ID NO: 127589 - protein, 10 aa, synthetic construct
AMNRGDRGVV

SEQ ID NO: 127590 - protein, 10 aa, synthetic construct
AMQRGDRGVV

SEQ ID NO: 127591 - protein, 10 aa, synthetic construct
AMDRGDRGVV

SEQ ID NO: 127592 - protein, 10 aa, synthetic construct
AMERGDRGVV

SEQ ID NO: 127593 - protein, 10 aa, synthetic construct
AWGRGDRGVV

SEQ ID NO: 127594 - protein, 10 aa, synthetic construct
AWARGDRGVV

SEQ ID NO: 127595 - protein, 10 aa, synthetic construct
AWVRGDRGVV

SEQ ID NO: 127596 - protein, 10 aa, synthetic construct
AWPRGDRGVV

SEQ ID NO: 127597 - protein, 10 aa, synthetic construct
AWLRGDRGVV

SEQ ID NO: 127598 - protein, 10 aa, synthetic construct
AWIRGDRGVV

SEQ ID NO: 127599 - protein, 10 aa, synthetic construct
AWMRGDRGVV

SEQ ID NO: 127600 - protein, 10 aa, synthetic construct
AWWRGDRGVV

SEQ ID NO: 127601 - protein, 10 aa, synthetic construct
AWFRGDRGVV

SEQ ID NO: 127602 - protein, 10 aa, synthetic construct
AWKRGDRGVV

SEQ ID NO: 127603 - protein, 10 aa, synthetic construct
AWRRGDRGVV

SEQ ID NO: 127604 - protein, 10 aa, synthetic construct
AWHRGDRGVV

SEQ ID NO: 127605 - protein, 10 aa, synthetic construct
AWSRGDRGVV

SEQ ID NO: 127606 - protein, 10 aa, synthetic construct
AWTRGDRGVV

SEQ ID NO: 127607 - protein, 10 aa, synthetic construct
AWYRGDRGVV

SEQ ID NO: 127608 - protein, 10 aa, synthetic construct
AWNRGDRGVV

SEQ ID NO: 127609 - protein, 10 aa, synthetic construct
AWQRGDRGVV

SEQ ID NO: 127610 - protein, 10 aa, synthetic construct
AWDRGDRGVV

SEQ ID NO: 127611 - protein, 10 aa, synthetic construct
AWERGDRGVV

SEQ ID NO: 127612 - protein, 10 aa, synthetic construct
AFGRGDRGVV

SEQ ID NO: 127613 - protein, 10 aa, synthetic construct
AFARGDRGVV

SEQ ID NO: 127614 - protein, 10 aa, synthetic construct
AFVRGDRGVV

SEQ ID NO: 127615 - protein, 10 aa, synthetic construct
AFPRGDRGVV

SEQ ID NO: 127616 - protein, 10 aa, synthetic construct
AFLRGDRGVV

SEQ ID NO: 127617 - protein, 10 aa, synthetic construct
AFIRGDRGVV

SEQ ID NO: 127618 - protein, 10 aa, synthetic construct
AFMRGDRGVV

SEQ ID NO: 127619 - protein, 10 aa, synthetic construct
AFWRGDRGVV

SEQ ID NO: 127620 - protein, 10 aa, synthetic construct
AFFRGDRGVV

SEQ ID NO: 127621 - protein, 10 aa, synthetic construct
AFKRGDRGVV

SEQ ID NO: 127622 - protein, 10 aa, synthetic construct
AFRRGDRGVV

SEQ ID NO: 127623 - protein, 10 aa, synthetic construct
AFHRGDRGVV

SEQ ID NO: 127624 - protein, 10 aa, synthetic construct
AFSRGDRGVV

SEQ ID NO: 127625 - protein, 10 aa, synthetic construct
AFTRGDRGVV

SEQ ID NO: 127626 - protein, 10 aa, synthetic construct
AFYRGDRGVV

SEQ ID NO: 127627 - protein, 10 aa, synthetic construct
AFNRGDRGVV

SEQ ID NO: 127628 - protein, 10 aa, synthetic construct
AFQRGDRGVV

SEQ ID NO: 127629 - protein, 10 aa, synthetic construct
AFDRGDRGVV

SEQ ID NO: 127630 - protein, 10 aa, synthetic construct
AFERGDRGVV

SEQ ID NO: 127631 - protein, 10 aa, synthetic construct
AKGRGDRGVV

SEQ ID NO: 127632 - protein, 10 aa, synthetic construct
AKARGDRGVV

SEQ ID NO: 127633 - protein, 10 aa, synthetic construct
AKVRGDRGVV

SEQ ID NO: 127634 - protein, 10 aa, synthetic construct
AKPRGDRGVV

SEQ ID NO: 127635 - protein, 10 aa, synthetic construct
AKLRGDRGVV

SEQ ID NO: 127636 - protein, 10 aa, synthetic construct
AKIRGDRGVV

SEQ ID NO: 127637 - protein, 10 aa, synthetic construct
AKMRGDRGVV

SEQ ID NO: 127638 - protein, 10 aa, synthetic construct
AKWRGDRGVV

SEQ ID NO: 127639 - protein, 10 aa, synthetic construct
AKFRGDRGVV

SEQ ID NO: 127640 - protein, 10 aa, synthetic construct
AKKRGDRGVV

SEQ ID NO: 127641 - protein, 10 aa, synthetic construct
AKRRGDRGVV

SEQ ID NO: 127642 - protein, 10 aa, synthetic construct
AKHRGDRGVV

SEQ ID NO: 127643 - protein, 10 aa, synthetic construct
AKSRGDRGVV

SEQ ID NO: 127644 - protein, 10 aa, synthetic construct
AKTRGDRGVV

SEQ ID NO: 127645 - protein, 10 aa, synthetic construct
AKYRGDRGVV

SEQ ID NO: 127646 - protein, 10 aa, synthetic construct
AKNRGDRGVV

SEQ ID NO: 127647 - protein, 10 aa, synthetic construct
AKQRGDRGVV

SEQ ID NO: 127648 - protein, 10 aa, synthetic construct
AKDRGDRGVV

SEQ ID NO: 127649 - protein, 10 aa, synthetic construct
AKERGDRGVV

SEQ ID NO: 127650 - protein, 10 aa, synthetic construct
ARGRGDRGVV

SEQ ID NO: 127651 - protein, 10 aa, synthetic construct
ARARGDRGVV

SEQ ID NO: 127652 - protein, 10 aa, synthetic construct
ARVRGDRGVV

SEQ ID NO: 127653 - protein, 10 aa, synthetic construct
ARPRGDRGVV

SEQ ID NO: 127654 - protein, 10 aa, synthetic construct
ARLRGDRGVV

SEQ ID NO: 127655 - protein, 10 aa, synthetic construct
ARIRGDRGVV

SEQ ID NO: 127656 - protein, 10 aa, synthetic construct
ARMRGDRGVV

SEQ ID NO: 127657 - protein, 10 aa, synthetic construct
ARWRGDRGVV

SEQ ID NO: 127658 - protein, 10 aa, synthetic construct
ARFRGDRGVV

SEQ ID NO: 127659 - protein, 10 aa, synthetic construct
ARKRGDRGVV

SEQ ID NO: 127660 - protein, 10 aa, synthetic construct
ARRRGDRGVV

SEQ ID NO: 127661 - protein, 10 aa, synthetic construct
ARHRGDRGVV

SEQ ID NO: 127662 - protein, 10 aa, synthetic construct
ARSRGDRGVV

SEQ ID NO: 127663 - protein, 10 aa, synthetic construct
ARTRGDRGVV

SEQ ID NO: 127664 - protein, 10 aa, synthetic construct
ARYRGDRGVV

SEQ ID NO: 127665 - protein, 10 aa, synthetic construct
ARNRGDRGVV

SEQ ID NO: 127666 - protein, 10 aa, synthetic construct
ARQRGDRGVV

SEQ ID NO: 127667 - protein, 10 aa, synthetic construct
ARDRGDRGVV

SEQ ID NO: 127668 - protein, 10 aa, synthetic construct
ARERGDRGVV

SEQ ID NO: 127669 - protein, 10 aa, synthetic construct
AHGRGDRGVV

SEQ ID NO: 127670 - protein, 10 aa, synthetic construct
AHARGDRGVV

SEQ ID NO: 127671 - protein, 10 aa, synthetic construct
AHVRGDRGVV

SEQ ID NO: 127672 - protein, 10 aa, synthetic construct
AHPRGDRGVV

SEQ ID NO: 127673 - protein, 10 aa, synthetic construct
AHLRGDRGVV

SEQ ID NO: 127674 - protein, 10 aa, synthetic construct
AHIRGDRGVV

SEQ ID NO: 127675 - protein, 10 aa, synthetic construct
AHMRGDRGVV

SEQ ID NO: 127676 - protein, 10 aa, synthetic construct
AHWRGDRGVV

SEQ ID NO: 127677 - protein, 10 aa, synthetic construct
AHFRGDRGVV

SEQ ID NO: 127678 - protein, 10 aa, synthetic construct
AHKRGDRGVV

SEQ ID NO: 127679 - protein, 10 aa, synthetic construct
AHRRGDRGVV

SEQ ID NO: 127680 - protein, 10 aa, synthetic construct
AHHRGDRGVV

SEQ ID NO: 127681 - protein, 10 aa, synthetic construct
AHSRGDRGVV

SEQ ID NO: 127682 - protein, 10 aa, synthetic construct
AHTRGDRGVV

SEQ ID NO: 127683 - protein, 10 aa, synthetic construct
AHYRGDRGVV

SEQ ID NO: 127684 - protein, 10 aa, synthetic construct
AHNRGDRGVV

SEQ ID NO: 127685 - protein, 10 aa, synthetic construct
AHQRGDRGVV

SEQ ID NO: 127686 - protein, 10 aa, synthetic construct
AHDRGDRGVV

SEQ ID NO: 127687 - protein, 10 aa, synthetic construct
AHERGDRGVV

SEQ ID NO: 127688 - protein, 10 aa, synthetic construct
ASGRGDRGVV

SEQ ID NO: 127689 - protein, 10 aa, synthetic construct
ASARGDRGVV

SEQ ID NO: 127690 - protein, 10 aa, synthetic construct
ASVRGDRGVV

SEQ ID NO: 127691 - protein, 10 aa, synthetic construct
ASPRGDRGVV

SEQ ID NO: 127692 - protein, 10 aa, synthetic construct
ASLRGDRGVV

SEQ ID NO: 127693 - protein, 10 aa, synthetic construct
ASIRGDRGVV

SEQ ID NO: 127694 - protein, 10 aa, synthetic construct
ASMRGDRGVV

SEQ ID NO: 127695 - protein, 10 aa, synthetic construct
ASWRGDRGVV

SEQ ID NO: 127696 - protein, 10 aa, synthetic construct
ASFRGDRGVV

SEQ ID NO: 127697 - protein, 10 aa, synthetic construct
ASKRGDRGVV

SEQ ID NO: 127698 - protein, 10 aa, synthetic construct
ASRRGDRGVV

SEQ ID NO: 127699 - protein, 10 aa, synthetic construct
ASHRGDRGVV

SEQ ID NO: 127700 - protein, 10 aa, synthetic construct
ASSRGDRGVV

SEQ ID NO: 127701 - protein, 10 aa, synthetic construct
ASTRGDRGVV

SEQ ID NO: 127702 - protein, 10 aa, synthetic construct
ASYRGDRGVV

SEQ ID NO: 127703 - protein, 10 aa, synthetic construct
ASNRGDRGVV

SEQ ID NO: 127704 - protein, 10 aa, synthetic construct
ASQRGDRGVV

SEQ ID NO: 127705 - protein, 10 aa, synthetic construct
ASDRGDRGVV

SEQ ID NO: 127706 - protein, 10 aa, synthetic construct
ASERGDRGVV

SEQ ID NO: 127707 - protein, 10 aa, synthetic construct
ATGRGDRGVV

SEQ ID NO: 127708 - protein, 10 aa, synthetic construct
ATARGDRGVV

SEQ ID NO: 127709 - protein, 10 aa, synthetic construct
ATVRGDRGVV

SEQ ID NO: 127710 - protein, 10 aa, synthetic construct
ATPRGDRGVV

SEQ ID NO: 127711 - protein, 10 aa, synthetic construct
ATLRGDRGVV

SEQ ID NO: 127712 - protein, 10 aa, synthetic construct
ATIRGDRGVV

SEQ ID NO: 127713 - protein, 10 aa, synthetic construct
ATMRGDRGVV

SEQ ID NO: 127714 - protein, 10 aa, synthetic construct
ATWRGDRGVV

SEQ ID NO: 127715 - protein, 10 aa, synthetic construct
ATFRGDRGVV

SEQ ID NO: 127716 - protein, 10 aa, synthetic construct
ATKRGDRGVV

SEQ ID NO: 127717 - protein, 10 aa, synthetic construct
ATRRGDRGVV

SEQ ID NO: 127718 - protein, 10 aa, synthetic construct
ATHRGDRGVV

SEQ ID NO: 127719 - protein, 10 aa, synthetic construct
ATSRGDRGVV

SEQ ID NO: 127720 - protein, 10 aa, synthetic construct
ATTRGDRGVV

SEQ ID NO: 127721 - protein, 10 aa, synthetic construct
ATYRGDRGVV

SEQ ID NO: 127722 - protein, 10 aa, synthetic construct
ATNRGDRGVV

SEQ ID NO: 127723 - protein, 10 aa, synthetic construct
ATQRGDRGVV

SEQ ID NO: 127724 - protein, 10 aa, synthetic construct
ATDRGDRGVV

SEQ ID NO: 127725 - protein, 10 aa, synthetic construct
ATERGDRGVV

SEQ ID NO: 127726 - protein, 10 aa, synthetic construct
AYGRGDRGVV

SEQ ID NO: 127727 - protein, 10 aa, synthetic construct
AYARGDRGVV

SEQ ID NO: 127728 - protein, 10 aa, synthetic construct
AYVRGDRGVV

SEQ ID NO: 127729 - protein, 10 aa, synthetic construct
AYPRGDRGVV

SEQ ID NO: 127730 - protein, 10 aa, synthetic construct
AYLRGDRGVV

SEQ ID NO: 127731 - protein, 10 aa, synthetic construct
AYIRGDRGVV

SEQ ID NO: 127732 - protein, 10 aa, synthetic construct
AYMRGDRGVV

SEQ ID NO: 127733 - protein, 10 aa, synthetic construct
AYWRGDRGVV

SEQ ID NO: 127734 - protein, 10 aa, synthetic construct
AYFRGDRGVV

SEQ ID NO: 127735 - protein, 10 aa, synthetic construct
AYKRGDRGVV

SEQ ID NO: 127736 - protein, 10 aa, synthetic construct
AYRRGDRGVV

SEQ ID NO: 127737 - protein, 10 aa, synthetic construct
AYHRGDRGVV

SEQ ID NO: 127738 - protein, 10 aa, synthetic construct
AYSRGDRGVV

SEQ ID NO: 127739 - protein, 10 aa, synthetic construct
AYTRGDRGVV

SEQ ID NO: 127740 - protein, 10 aa, synthetic construct
AYYRGDRGVV

SEQ ID NO: 127741 - protein, 10 aa, synthetic construct
AYNRGDRGVV

SEQ ID NO: 127742 - protein, 10 aa, synthetic construct
AYQRGDRGVV

SEQ ID NO: 127743 - protein, 10 aa, synthetic construct
AYDRGDRGVV

SEQ ID NO: 127744 - protein, 10 aa, synthetic construct
AYERGDRGVV

SEQ ID NO: 127745 - protein, 10 aa, synthetic construct
ANGRGDRGVV

SEQ ID NO: 127746 - protein, 10 aa, synthetic construct
ANARGDRGVV

SEQ ID NO: 127747 - protein, 10 aa, synthetic construct
ANVRGDRGVV

SEQ ID NO: 127748 - protein, 10 aa, synthetic construct
ANPRGDRGVV

SEQ ID NO: 127749 - protein, 10 aa, synthetic construct
ANLRGDRGVV

SEQ ID NO: 127750 - protein, 10 aa, synthetic construct
ANIRGDRGVV

SEQ ID NO: 127751 - protein, 10 aa, synthetic construct
ANMRGDRGVV

SEQ ID NO: 127752 - protein, 10 aa, synthetic construct
ANWRGDRGVV

SEQ ID NO: 127753 - protein, 10 aa, synthetic construct
ANFRGDRGVV

SEQ ID NO: 127754 - protein, 10 aa, synthetic construct
ANKRGDRGVV

SEQ ID NO: 127755 - protein, 10 aa, synthetic construct
ANRRGDRGVV

SEQ ID NO: 127756 - protein, 10 aa, synthetic construct
ANHRGDRGVV

SEQ ID NO: 127757 - protein, 10 aa, synthetic construct
ANSRGDRGVV

SEQ ID NO: 127758 - protein, 10 aa, synthetic construct
ANTRGDRGVV

SEQ ID NO: 127759 - protein, 10 aa, synthetic construct
ANYRGDRGVV

SEQ ID NO: 127760 - protein, 10 aa, synthetic construct
ANNRGDRGVV

SEQ ID NO: 127761 - protein, 10 aa, synthetic construct
ANQRGDRGVV

SEQ ID NO: 127762 - protein, 10 aa, synthetic construct
ANDRGDRGVV

SEQ ID NO: 127763 - protein, 10 aa, synthetic construct
ANERGDRGVV

SEQ ID NO: 127764 - protein, 10 aa, synthetic construct
AQGRGDRGVV

SEQ ID NO: 127765 - protein, 10 aa, synthetic construct
AQARGDRGVV

SEQ ID NO: 127766 - protein, 10 aa, synthetic construct
AQVRGDRGVV

SEQ ID NO: 127767 - protein, 10 aa, synthetic construct
AQPRGDRGVV

SEQ ID NO: 127768 - protein, 10 aa, synthetic construct
AQLRGDRGVV

SEQ ID NO: 127769 - protein, 10 aa, synthetic construct
AQIRGDRGVV

SEQ ID NO: 127770 - protein, 10 aa, synthetic construct
AQMRGDRGVV

SEQ ID NO: 127771 - protein, 10 aa, synthetic construct
AQWRGDRGVV

SEQ ID NO: 127772 - protein, 10 aa, synthetic construct
AQFRGDRGVV

SEQ ID NO: 127773 - protein, 10 aa, synthetic construct
AQKRGDRGVV

SEQ ID NO: 127774 - protein, 10 aa, synthetic construct
AQRRGDRGVV

SEQ ID NO: 127775 - protein, 10 aa, synthetic construct
AQHRGDRGVV

SEQ ID NO: 127776 - protein, 10 aa, synthetic construct
AQSRGDRGVV

SEQ ID NO: 127777 - protein, 10 aa, synthetic construct
AQTRGDRGVV

SEQ ID NO: 127778 - protein, 10 aa, synthetic construct
AQYRGDRGVV

SEQ ID NO: 127779 - protein, 10 aa, synthetic construct
AQNRGDRGVV

SEQ ID NO: 127780 - protein, 10 aa, synthetic construct
AQQRGDRGVV

SEQ ID NO: 127781 - protein, 10 aa, synthetic construct
AQDRGDRGVV

SEQ ID NO: 127782 - protein, 10 aa, synthetic construct
AQERGDRGVV

SEQ ID NO: 127783 - protein, 10 aa, synthetic construct
ADGRGDRGVV

SEQ ID NO: 127784 - protein, 10 aa, synthetic construct
ADARGDRGVV

SEQ ID NO: 127785 - protein, 10 aa, synthetic construct
ADVRGDRGVV

SEQ ID NO: 127786 - protein, 10 aa, synthetic construct
ADPRGDRGVV

SEQ ID NO: 127787 - protein, 10 aa, synthetic construct
ADLRGDRGVV

SEQ ID NO: 127788 - protein, 10 aa, synthetic construct
ADIRGDRGVV

SEQ ID NO: 127789 - protein, 10 aa, synthetic construct
ADMRGDRGVV

SEQ ID NO: 127790 - protein, 10 aa, synthetic construct
ADWRGDRGVV

SEQ ID NO: 127791 - protein, 10 aa, synthetic construct
ADFRGDRGVV

SEQ ID NO: 127792 - protein, 10 aa, synthetic construct
ADKRGDRGVV

SEQ ID NO: 127793 - protein, 10 aa, synthetic construct
ADRRGDRGVV

SEQ ID NO: 127794 - protein, 10 aa, synthetic construct
ADHRGDRGVV

SEQ ID NO: 127795 - protein, 10 aa, synthetic construct
ADSRGDRGVV

SEQ ID NO: 127796 - protein, 10 aa, synthetic construct
ADTRGDRGVV

SEQ ID NO: 127797 - protein, 10 aa, synthetic construct
ADYRGDRGVV

SEQ ID NO: 127798 - protein, 10 aa, synthetic construct
ADNRGDRGVV

SEQ ID NO: 127799 - protein, 10 aa, synthetic construct
ADQRGDRGVV

SEQ ID NO: 127800 - protein, 10 aa, synthetic construct
ADDRGDRGVV

SEQ ID NO: 127801 - protein, 10 aa, synthetic construct
ADERGDRGVV

SEQ ID NO: 127802 - protein, 10 aa, synthetic construct
AEGRGDRGVV

SEQ ID NO: 127803 - protein, 10 aa, synthetic construct
AEARGDRGVV

SEQ ID NO: 127804 - protein, 10 aa, synthetic construct
AEVRGDRGVV

SEQ ID NO: 127805 - protein, 10 aa, synthetic construct
AEPRGDRGVV

SEQ ID NO: 127806 - protein, 10 aa, synthetic construct
AELRGDRGVV

SEQ ID NO: 127807 - protein, 10 aa, synthetic construct
AEIRGDRGVV

SEQ ID NO: 127808 - protein, 10 aa, synthetic construct
AEMRGDRGVV

SEQ ID NO: 127809 - protein, 10 aa, synthetic construct
AEWRGDRGVV

SEQ ID NO: 127810 - protein, 10 aa, synthetic construct
AEFRGDRGVV

SEQ ID NO: 127811 - protein, 10 aa, synthetic construct
AEKRGDRGVV

SEQ ID NO: 127812 - protein, 10 aa, synthetic construct
AERRGDRGVV

SEQ ID NO: 127813 - protein, 10 aa, synthetic construct
AEHRGDRGVV

SEQ ID NO: 127814 - protein, 10 aa, synthetic construct
AESRGDRGVV

SEQ ID NO: 127815 - protein, 10 aa, synthetic construct
AETRGDRGVV

SEQ ID NO: 127816 - protein, 10 aa, synthetic construct
AEYRGDRGVV

SEQ ID NO: 127817 - protein, 10 aa, synthetic construct
AENRGDRGVV

SEQ ID NO: 127818 - protein, 10 aa, synthetic construct
AEQRGDRGVV

SEQ ID NO: 127819 - protein, 10 aa, synthetic construct
AEDRGDRGVV

SEQ ID NO: 127820 - protein, 10 aa, synthetic construct
AEERGDRGVV

SEQ ID NO: 127821 - protein, 10 aa, synthetic construct
EGGRGDRGVV

SEQ ID NO: 127822 - protein, 10 aa, synthetic construct
EGARGDRGVV

SEQ ID NO: 127823 - protein, 10 aa, synthetic construct
EGVRGDRGVV

SEQ ID NO: 127824 - protein, 10 aa, synthetic construct
EGPRGDRGVV

SEQ ID NO: 127825 - protein, 10 aa, synthetic construct
EGLRGDRGVV

SEQ ID NO: 127826 - protein, 10 aa, synthetic construct
EGIRGDRGVV

SEQ ID NO: 127827 - protein, 10 aa, synthetic construct
EGMRGDRGVV

SEQ ID NO: 127828 - protein, 10 aa, synthetic construct
EGWRGDRGVV

SEQ ID NO: 127829 - protein, 10 aa, synthetic construct
EGFRGDRGVV

SEQ ID NO: 127830 - protein, 10 aa, synthetic construct
EGKRGDRGVV

SEQ ID NO: 127831 - protein, 10 aa, synthetic construct
EGRRGDRGVV

SEQ ID NO: 127832 - protein, 10 aa, synthetic construct
EGHRGDRGVV

SEQ ID NO: 127833 - protein, 10 aa, synthetic construct
EGSRGDRGVV

SEQ ID NO: 127834 - protein, 10 aa, synthetic construct
EGTRGDRGVV

SEQ ID NO: 127835 - protein, 10 aa, synthetic construct
EGYRGDRGVV

SEQ ID NO: 127836 - protein, 10 aa, synthetic construct
EGNRGDRGVV

SEQ ID NO: 127837 - protein, 10 aa, synthetic construct
EGQRGDRGVV

SEQ ID NO: 127838 - protein, 10 aa, synthetic construct
EGDRGDRGVV

SEQ ID NO: 127839 - protein, 10 aa, synthetic construct
EGERGDRGVV

SEQ ID NO: 127840 - protein, 10 aa, synthetic construct
EAGRGDRGVV

SEQ ID NO: 127841 - protein, 10 aa, synthetic construct
EAARGDRGVV

SEQ ID NO: 127842 - protein, 10 aa, synthetic construct
EAVRGDRGVV

SEQ ID NO: 127843 - protein, 10 aa, synthetic construct
EAPRGDRGVV

SEQ ID NO: 127844 - protein, 10 aa, synthetic construct
EALRGDRGVV

SEQ ID NO: 127845 - protein, 10 aa, synthetic construct
EAIRGDRGVV

SEQ ID NO: 127846 - protein, 10 aa, synthetic construct
EAMRGDRGVV

SEQ ID NO: 127847 - protein, 10 aa, synthetic construct
EAWRGDRGVV

SEQ ID NO: 127848 - protein, 10 aa, synthetic construct
EAFRGDRGVV

SEQ ID NO: 127849 - protein, 10 aa, synthetic construct
EAKRGDRGVV

SEQ ID NO: 127850 - protein, 10 aa, synthetic construct
EARRGDRGVV

SEQ ID NO: 127851 - protein, 10 aa, synthetic construct
EAHRGDRGVV

SEQ ID NO: 127852 - protein, 10 aa, synthetic construct
EASRGDRGVV

SEQ ID NO: 127853 - protein, 10 aa, synthetic construct
EATRGDRGVV

SEQ ID NO: 127854 - protein, 10 aa, synthetic construct
EAYRGDRGVV

SEQ ID NO: 127855 - protein, 10 aa, synthetic construct
EANRGDRGVV

SEQ ID NO: 127856 - protein, 10 aa, synthetic construct
EAQRGDRGVV

SEQ ID NO: 127857 - protein, 10 aa, synthetic construct
EADRGDRGVV

SEQ ID NO: 127858 - protein, 10 aa, synthetic construct
EAERGDRGVV

SEQ ID NO: 127859 - protein, 10 aa, synthetic construct
EVGRGDRGVV

SEQ ID NO: 127860 - protein, 10 aa, synthetic construct
EVARGDRGVV

SEQ ID NO: 127861 - protein, 10 aa, synthetic construct
EVVRGDRGVV

SEQ ID NO: 127862 - protein, 10 aa, synthetic construct
EVPRGDRGVV

SEQ ID NO: 127863 - protein, 10 aa, synthetic construct
EVLRGDRGVV

SEQ ID NO: 127864 - protein, 10 aa, synthetic construct
EVIRGDRGVV

SEQ ID NO: 127865 - protein, 10 aa, synthetic construct
EVMRGDRGVV

SEQ ID NO: 127866 - protein, 10 aa, synthetic construct
EVWRGDRGVV

SEQ ID NO: 127867 - protein, 10 aa, synthetic construct
EVFRGDRGVV

SEQ ID NO: 127868 - protein, 10 aa, synthetic construct
EVKRGDRGVV

SEQ ID NO: 127869 - protein, 10 aa, synthetic construct
EVRRGDRGVV

SEQ ID NO: 127870 - protein, 10 aa, synthetic construct
EVHRGDRGVV

SEQ ID NO: 127871 - protein, 10 aa, synthetic construct
EVSRGDRGVV

SEQ ID NO: 127872 - protein, 10 aa, synthetic construct
EVTRGDRGVV

SEQ ID NO: 127873 - protein, 10 aa, synthetic construct
EVYRGDRGVV

SEQ ID NO: 127874 - protein, 10 aa, synthetic construct
EVNRGDRGVV

SEQ ID NO: 127875 - protein, 10 aa, synthetic construct
EVQRGDRGVV

SEQ ID NO: 127876 - protein, 10 aa, synthetic construct
EVDRGDRGVV

SEQ ID NO: 127877 - protein, 10 aa, synthetic construct
EVERGDRGVV

SEQ ID NO: 127878 - protein, 10 aa, synthetic construct
EPGRGDRGVV

SEQ ID NO: 127879 - protein, 10 aa, synthetic construct
EPARGDRGVV

SEQ ID NO: 127880 - protein, 10 aa, synthetic construct
EPVRGDRGVV

SEQ ID NO: 127881 - protein, 10 aa, synthetic construct
EPPRGDRGVV

SEQ ID NO: 127882 - protein, 10 aa, synthetic construct
EPLRGDRGVV

SEQ ID NO: 127883 - protein, 10 aa, synthetic construct
EPIRGDRGVV

SEQ ID NO: 127884 - protein, 10 aa, synthetic construct
EPMRGDRGVV

SEQ ID NO: 127885 - protein, 10 aa, synthetic construct
EPWRGDRGVV

SEQ ID NO: 127886 - protein, 10 aa, synthetic construct
EPFRGDRGVV

SEQ ID NO: 127887 - protein, 10 aa, synthetic construct
EPKRGDRGVV

SEQ ID NO: 127888 - protein, 10 aa, synthetic construct
EPRRGDRGVV

SEQ ID NO: 127889 - protein, 10 aa, synthetic construct
EPHRGDRGVV

SEQ ID NO: 127890 - protein, 10 aa, synthetic construct
EPSRGDRGVV

SEQ ID NO: 127891 - protein, 10 aa, synthetic construct
EPTRGDRGVV

SEQ ID NO: 127892 - protein, 10 aa, synthetic construct
EPYRGDRGVV

SEQ ID NO: 127893 - protein, 10 aa, synthetic construct
EPNRGDRGVV

SEQ ID NO: 127894 - protein, 10 aa, synthetic construct
EPQRGDRGVV

SEQ ID NO: 127895 - protein, 10 aa, synthetic construct
EPDRGDRGVV

SEQ ID NO: 127896 - protein, 10 aa, synthetic construct
EPERGDRGVV

SEQ ID NO: 127897 - protein, 10 aa, synthetic construct
ELGRGDRGVV

SEQ ID NO: 127898 - protein, 10 aa, synthetic construct
ELARGDRGVV

SEQ ID NO: 127899 - protein, 10 aa, synthetic construct
ELVRGDRGVV

SEQ ID NO: 127900 - protein, 10 aa, synthetic construct
ELPRGDRGVV

SEQ ID NO: 127901 - protein, 10 aa, synthetic construct
ELLRGDRGVV

SEQ ID NO: 127902 - protein, 10 aa, synthetic construct
ELIRGDRGVV

SEQ ID NO: 127903 - protein, 10 aa, synthetic construct
ELMRGDRGVV

SEQ ID NO: 127904 - protein, 10 aa, synthetic construct
ELWRGDRGVV

SEQ ID NO: 127905 - protein, 10 aa, synthetic construct
ELFRGDRGVV

SEQ ID NO: 127906 - protein, 10 aa, synthetic construct
ELKRGDRGVV

SEQ ID NO: 127907 - protein, 10 aa, synthetic construct
ELRRGDRGVV

SEQ ID NO: 127908 - protein, 10 aa, synthetic construct
ELHRGDRGVV

SEQ ID NO: 127909 - protein, 10 aa, synthetic construct
ELSRGDRGVV

SEQ ID NO: 127910 - protein, 10 aa, synthetic construct
ELTRGDRGVV

SEQ ID NO: 127911 - protein, 10 aa, synthetic construct
ELYRGDRGVV

SEQ ID NO: 127912 - protein, 10 aa, synthetic construct
ELNRGDRGVV

SEQ ID NO: 127913 - protein, 10 aa, synthetic construct
ELQRGDRGVV

SEQ ID NO: 127914 - protein, 10 aa, synthetic construct
ELDRGDRGVV

SEQ ID NO: 127915 - protein, 10 aa, synthetic construct
ELERGDRGVV

SEQ ID NO: 127916 - protein, 10 aa, synthetic construct
EIGRGDRGVV

SEQ ID NO: 127917 - protein, 10 aa, synthetic construct
EIARGDRGVV

SEQ ID NO: 127918 - protein, 10 aa, synthetic construct
EIVRGDRGVV

SEQ ID NO: 127919 - protein, 10 aa, synthetic construct
EIPRGDRGVV

SEQ ID NO: 127920 - protein, 10 aa, synthetic construct
EILRGDRGVV

SEQ ID NO: 127921 - protein, 10 aa, synthetic construct
EIIRGDRGVV

SEQ ID NO: 127922 - protein, 10 aa, synthetic construct
EIMRGDRGVV

SEQ ID NO: 127923 - protein, 10 aa, synthetic construct
EIWRGDRGVV

SEQ ID NO: 127924 - protein, 10 aa, synthetic construct
EIFRGDRGVV

SEQ ID NO: 127925 - protein, 10 aa, synthetic construct
EIKRGDRGVV

SEQ ID NO: 127926 - protein, 10 aa, synthetic construct
EIRRGDRGVV

SEQ ID NO: 127927 - protein, 10 aa, synthetic construct
EIHRGDRGVV

SEQ ID NO: 127928 - protein, 10 aa, synthetic construct
EISRGDRGVV

SEQ ID NO: 127929 - protein, 10 aa, synthetic construct
EITRGDRGVV

SEQ ID NO: 127930 - protein, 10 aa, synthetic construct
EIYRGDRGVV

SEQ ID NO: 127931 - protein, 10 aa, synthetic construct
EINRGDRGVV

SEQ ID NO: 127932 - protein, 10 aa, synthetic construct
EIQRGDRGVV

SEQ ID NO: 127933 - protein, 10 aa, synthetic construct
EIDRGDRGVV

SEQ ID NO: 127934 - protein, 10 aa, synthetic construct
EIERGDRGVV

SEQ ID NO: 127935 - protein, 10 aa, synthetic construct
EMGRGDRGVV

SEQ ID NO: 127936 - protein, 10 aa, synthetic construct
EMARGDRGVV

SEQ ID NO: 127937 - protein, 10 aa, synthetic construct
EMVRGDRGVV

SEQ ID NO: 127938 - protein, 10 aa, synthetic construct
EMPRGDRGVV

SEQ ID NO: 127939 - protein, 10 aa, synthetic construct
EMLRGDRGVV

SEQ ID NO: 127940 - protein, 10 aa, synthetic construct
EMIRGDRGVV

SEQ ID NO: 127941 - protein, 10 aa, synthetic construct
EMMRGDRGVV

SEQ ID NO: 127942 - protein, 10 aa, synthetic construct
EMWRGDRGVV

SEQ ID NO: 127943 - protein, 10 aa, synthetic construct
EMFRGDRGVV

SEQ ID NO: 127944 - protein, 10 aa, synthetic construct
EMKRGDRGVV

SEQ ID NO: 127945 - protein, 10 aa, synthetic construct
EMRRGDRGVV

SEQ ID NO: 127946 - protein, 10 aa, synthetic construct
EMHRGDRGVV

SEQ ID NO: 127947 - protein, 10 aa, synthetic construct
EMSRGDRGVV

SEQ ID NO: 127948 - protein, 10 aa, synthetic construct
EMTRGDRGVV

SEQ ID NO: 127949 - protein, 10 aa, synthetic construct
EMYRGDRGVV

SEQ ID NO: 127950 - protein, 10 aa, synthetic construct
EMNRGDRGVV

SEQ ID NO: 127951 - protein, 10 aa, synthetic construct
EMQRGDRGVV

SEQ ID NO: 127952 - protein, 10 aa, synthetic construct
EMDRGDRGVV

SEQ ID NO: 127953 - protein, 10 aa, synthetic construct
EMERGDRGVV

SEQ ID NO: 127954 - protein, 10 aa, synthetic construct
EWGRGDRGVV

SEQ ID NO: 127955 - protein, 10 aa, synthetic construct
EWARGDRGVV

SEQ ID NO: 127956 - protein, 10 aa, synthetic construct
EWVRGDRGVV

SEQ ID NO: 127957 - protein, 10 aa, synthetic construct
EWPRGDRGVV

SEQ ID NO: 127958 - protein, 10 aa, synthetic construct
EWLRGDRGVV

SEQ ID NO: 127959 - protein, 10 aa, synthetic construct
EWIRGDRGVV

SEQ ID NO: 127960 - protein, 10 aa, synthetic construct
EWMRGDRGVV

SEQ ID NO: 127961 - protein, 10 aa, synthetic construct
EWWRGDRGVV

SEQ ID NO: 127962 - protein, 10 aa, synthetic construct
EWFRGDRGVV

SEQ ID NO: 127963 - protein, 10 aa, synthetic construct
EWKRGDRGVV

SEQ ID NO: 127964 - protein, 10 aa, synthetic construct
EWRRGDRGVV

SEQ ID NO: 127965 - protein, 10 aa, synthetic construct
EWHRGDRGVV

SEQ ID NO: 127966 - protein, 10 aa, synthetic construct
EWSRGDRGVV

SEQ ID NO: 127967 - protein, 10 aa, synthetic construct
EWTRGDRGVV

SEQ ID NO: 127968 - protein, 10 aa, synthetic construct
EWYRGDRGVV

SEQ ID NO: 127969 - protein, 10 aa, synthetic construct
EWNRGDRGVV

SEQ ID NO: 127970 - protein, 10 aa, synthetic construct
EWQRGDRGVV

SEQ ID NO: 127971 - protein, 10 aa, synthetic construct
EWDRGDRGVV

SEQ ID NO: 127972 - protein, 10 aa, synthetic construct
EWERGDRGVV

SEQ ID NO: 127973 - protein, 10 aa, synthetic construct
EFGRGDRGVV

SEQ ID NO: 127974 - protein, 10 aa, synthetic construct
EFARGDRGVV

SEQ ID NO: 127975 - protein, 10 aa, synthetic construct
EFVRGDRGVV

SEQ ID NO: 127976 - protein, 10 aa, synthetic construct
EFPRGDRGVV

SEQ ID NO: 127977 - protein, 10 aa, synthetic construct
EFLRGDRGVV

SEQ ID NO: 127978 - protein, 10 aa, synthetic construct
EFIRGDRGVV

SEQ ID NO: 127979 - protein, 10 aa, synthetic construct
EFMRGDRGVV

SEQ ID NO: 127980 - protein, 10 aa, synthetic construct
EFWRGDRGVV

SEQ ID NO: 127981 - protein, 10 aa, synthetic construct
EFFRGDRGVV

SEQ ID NO: 127982 - protein, 10 aa, synthetic construct
EFKRGDRGVV

SEQ ID NO: 127983 - protein, 10 aa, synthetic construct
EFRRGDRGVV

SEQ ID NO: 127984 - protein, 10 aa, synthetic construct
EFHRGDRGVV

SEQ ID NO: 127985 - protein, 10 aa, synthetic construct
EFSRGDRGVV

SEQ ID NO: 127986 - protein, 10 aa, synthetic construct
EFTRGDRGVV

SEQ ID NO: 127987 - protein, 10 aa, synthetic construct
EFYRGDRGVV

SEQ ID NO: 127988 - protein, 10 aa, synthetic construct
EFNRGDRGVV

SEQ ID NO: 127989 - protein, 10 aa, synthetic construct
EFQRGDRGVV

SEQ ID NO: 127990 - protein, 10 aa, synthetic construct
EFDRGDRGVV

SEQ ID NO: 127991 - protein, 10 aa, synthetic construct
EFERGDRGVV

SEQ ID NO: 127992 - protein, 10 aa, synthetic construct
EKGRGDRGVV

SEQ ID NO: 127993 - protein, 10 aa, synthetic construct
EKARGDRGVV

SEQ ID NO: 127994 - protein, 10 aa, synthetic construct
EKVRGDRGVV

SEQ ID NO: 127995 - protein, 10 aa, synthetic construct
EKPRGDRGVV

SEQ ID NO: 127996 - protein, 10 aa, synthetic construct
EKLRGDRGVV

SEQ ID NO: 127997 - protein, 10 aa, synthetic construct
EKIRGDRGVV

SEQ ID NO: 127998 - protein, 10 aa, synthetic construct
EKMRGDRGVV

SEQ ID NO: 127999 - protein, 10 aa, synthetic construct
EKWRGDRGVV

SEQ ID NO: 128000 - protein, 10 aa, synthetic construct
EKFRGDRGVV

SEQ ID NO: 128001 - protein, 10 aa, synthetic construct
EKKRGDRGVV

SEQ ID NO: 128002 - protein, 10 aa, synthetic construct
EKRRGDRGVV

SEQ ID NO: 128003 - protein, 10 aa, synthetic construct
EKHRGDRGVV

SEQ ID NO: 128004 - protein, 10 aa, synthetic construct
EKSRGDRGVV

SEQ ID NO: 128005 - protein, 10 aa, synthetic construct
EKTRGDRGVV

SEQ ID NO: 128006 - protein, 10 aa, synthetic construct
EKYRGDRGVV

SEQ ID NO: 128007 - protein, 10 aa, synthetic construct
EKNRGDRGVV

SEQ ID NO: 128008 - protein, 10 aa, synthetic construct
EKQRGDRGVV

SEQ ID NO: 128009 - protein, 10 aa, synthetic construct
EKDRGDRGVV

SEQ ID NO: 128010 - protein, 10 aa, synthetic construct
EKERGDRGVV

SEQ ID NO: 128011 - protein, 10 aa, synthetic construct
ERGRGDRGVV

SEQ ID NO: 128012 - protein, 10 aa, synthetic construct
ERARGDRGVV

SEQ ID NO: 128013 - protein, 10 aa, synthetic construct
ERVRGDRGVV

SEQ ID NO: 128014 - protein, 10 aa, synthetic construct
ERPRGDRGVV

SEQ ID NO: 128015 - protein, 10 aa, synthetic construct
ERLRGDRGVV

SEQ ID NO: 128016 - protein, 10 aa, synthetic construct
ERIRGDRGVV

SEQ ID NO: 128017 - protein, 10 aa, synthetic construct
ERMRGDRGVV

SEQ ID NO: 128018 - protein, 10 aa, synthetic construct
ERWRGDRGVV

SEQ ID NO: 128019 - protein, 10 aa, synthetic construct
ERFRGDRGVV

SEQ ID NO: 128020 - protein, 10 aa, synthetic construct
ERKRGDRGVV

SEQ ID NO: 128021 - protein, 10 aa, synthetic construct
ERRRGDRGVV

SEQ ID NO: 128022 - protein, 10 aa, synthetic construct
ERHRGDRGVV

SEQ ID NO: 128023 - protein, 10 aa, synthetic construct
ERSRGDRGVV

SEQ ID NO: 128024 - protein, 10 aa, synthetic construct
ERTRGDRGVV

SEQ ID NO: 128025 - protein, 10 aa, synthetic construct
ERYRGDRGVV

SEQ ID NO: 128026 - protein, 10 aa, synthetic construct
ERNRGDRGVV

SEQ ID NO: 128027 - protein, 10 aa, synthetic construct
ERQRGDRGVV

SEQ ID NO: 128028 - protein, 10 aa, synthetic construct
ERDRGDRGVV

SEQ ID NO: 128029 - protein, 10 aa, synthetic construct
ERERGDRGVV

SEQ ID NO: 128030 - protein, 10 aa, synthetic construct
EHGRGDRGVV

SEQ ID NO: 128031 - protein, 10 aa, synthetic construct
EHARGDRGVV

SEQ ID NO: 128032 - protein, 10 aa, synthetic construct
EHVRGDRGVV

SEQ ID NO: 128033 - protein, 10 aa, synthetic construct
EHPRGDRGVV

SEQ ID NO: 128034 - protein, 10 aa, synthetic construct
EHLRGDRGVV

SEQ ID NO: 128035 - protein, 10 aa, synthetic construct
EHIRGDRGVV

SEQ ID NO: 128036 - protein, 10 aa, synthetic construct
EHMRGDRGVV

SEQ ID NO: 128037 - protein, 10 aa, synthetic construct
EHWRGDRGVV

SEQ ID NO: 128038 - protein, 10 aa, synthetic construct
EHFRGDRGVV

SEQ ID NO: 128039 - protein, 10 aa, synthetic construct
EHKRGDRGVV

SEQ ID NO: 128040 - protein, 10 aa, synthetic construct
EHRRGDRGVV

SEQ ID NO: 128041 - protein, 10 aa, synthetic construct
EHHRGDRGVV

SEQ ID NO: 128042 - protein, 10 aa, synthetic construct
EHSRGDRGVV

SEQ ID NO: 128043 - protein, 10 aa, synthetic construct
EHTRGDRGVV

SEQ ID NO: 128044 - protein, 10 aa, synthetic construct
EHYRGDRGVV

SEQ ID NO: 128045 - protein, 10 aa, synthetic construct
EHNRGDRGVV

SEQ ID NO: 128046 - protein, 10 aa, synthetic construct
EHQRGDRGVV

SEQ ID NO: 128047 - protein, 10 aa, synthetic construct
EHDRGDRGVV

SEQ ID NO: 128048 - protein, 10 aa, synthetic construct
EHERGDRGVV

SEQ ID NO: 128049 - protein, 10 aa, synthetic construct
ESGRGDRGVV

SEQ ID NO: 128050 - protein, 10 aa, synthetic construct
ESARGDRGVV

SEQ ID NO: 128051 - protein, 10 aa, synthetic construct
ESVRGDRGVV

SEQ ID NO: 128052 - protein, 10 aa, synthetic construct
ESPRGDRGVV

SEQ ID NO: 128053 - protein, 10 aa, synthetic construct
ESLRGDRGVV

SEQ ID NO: 128054 - protein, 10 aa, synthetic construct
ESIRGDRGVV

SEQ ID NO: 128055 - protein, 10 aa, synthetic construct
ESMRGDRGVV

SEQ ID NO: 128056 - protein, 10 aa, synthetic construct
ESWRGDRGVV

SEQ ID NO: 128057 - protein, 10 aa, synthetic construct
ESFRGDRGVV

SEQ ID NO: 128058 - protein, 10 aa, synthetic construct
ESKRGDRGVV

SEQ ID NO: 128059 - protein, 10 aa, synthetic construct
ESRRGDRGVV

SEQ ID NO: 128060 - protein, 10 aa, synthetic construct
ESHRGDRGVV

SEQ ID NO: 128061 - protein, 10 aa, synthetic construct
ESSRGDRGVV

SEQ ID NO: 128062 - protein, 10 aa, synthetic construct
ESTRGDRGVV

SEQ ID NO: 128063 - protein, 10 aa, synthetic construct
ESYRGDRGVV

SEQ ID NO: 128064 - protein, 10 aa, synthetic construct
ESNRGDRGVV

SEQ ID NO: 128065 - protein, 10 aa, synthetic construct
ESQRGDRGVV

SEQ ID NO: 128066 - protein, 10 aa, synthetic construct
ESDRGDRGVV

SEQ ID NO: 128067 - protein, 10 aa, synthetic construct
ESERGDRGVV

SEQ ID NO: 128068 - protein, 10 aa, synthetic construct
ETGRGDRGVV

SEQ ID NO: 128069 - protein, 10 aa, synthetic construct
ETARGDRGVV

SEQ ID NO: 128070 - protein, 10 aa, synthetic construct
ETVRGDRGVV

SEQ ID NO: 128071 - protein, 10 aa, synthetic construct
ETPRGDRGVV

SEQ ID NO: 128072 - protein, 10 aa, synthetic construct
ETLRGDRGVV

SEQ ID NO: 128073 - protein, 10 aa, synthetic construct
ETIRGDRGVV

SEQ ID NO: 128074 - protein, 10 aa, synthetic construct
ETMRGDRGVV

SEQ ID NO: 128075 - protein, 10 aa, synthetic construct
ETWRGDRGVV

SEQ ID NO: 128076 - protein, 10 aa, synthetic construct
ETFRGDRGVV

SEQ ID NO: 128077 - protein, 10 aa, synthetic construct
ETKRGDRGVV

SEQ ID NO: 128078 - protein, 10 aa, synthetic construct
ETRRGDRGVV

SEQ ID NO: 128079 - protein, 10 aa, synthetic construct
ETHRGDRGVV

SEQ ID NO: 128080 - protein, 10 aa, synthetic construct
ETSRGDRGVV

SEQ ID NO: 128081 - protein, 10 aa, synthetic construct
ETTRGDRGVV

SEQ ID NO: 128082 - protein, 10 aa, synthetic construct
ETYRGDRGVV

SEQ ID NO: 128083 - protein, 10 aa, synthetic construct
ETNRGDRGVV

SEQ ID NO: 128084 - protein, 10 aa, synthetic construct
ETQRGDRGVV

SEQ ID NO: 128085 - protein, 10 aa, synthetic construct
ETDRGDRGVV

SEQ ID NO: 128086 - protein, 10 aa, synthetic construct
ETERGDRGVV

SEQ ID NO: 128087 - protein, 10 aa, synthetic construct
EYGRGDRGVV

SEQ ID NO: 128088 - protein, 10 aa, synthetic construct
EYARGDRGVV

SEQ ID NO: 128089 - protein, 10 aa, synthetic construct
EYVRGDRGVV

SEQ ID NO: 128090 - protein, 10 aa, synthetic construct
EYPRGDRGVV

SEQ ID NO: 128091 - protein, 10 aa, synthetic construct
EYLRGDRGVV

SEQ ID NO: 128092 - protein, 10 aa, synthetic construct
EYIRGDRGVV

SEQ ID NO: 128093 - protein, 10 aa, synthetic construct
EYMRGDRGVV

SEQ ID NO: 128094 - protein, 10 aa, synthetic construct
EYWRGDRGVV

SEQ ID NO: 128095 - protein, 10 aa, synthetic construct
EYFRGDRGVV

SEQ ID NO: 128096 - protein, 10 aa, synthetic construct
EYKRGDRGVV

SEQ ID NO: 128097 - protein, 10 aa, synthetic construct
EYRRGDRGVV

SEQ ID NO: 128098 - protein, 10 aa, synthetic construct
EYHRGDRGVV

SEQ ID NO: 128099 - protein, 10 aa, synthetic construct
EYSRGDRGVV

SEQ ID NO: 128100 - protein, 10 aa, synthetic construct
EYTRGDRGVV

SEQ ID NO: 128101 - protein, 10 aa, synthetic construct
EYYRGDRGVV

SEQ ID NO: 128102 - protein, 10 aa, synthetic construct
EYNRGDRGVV

SEQ ID NO: 128103 - protein, 10 aa, synthetic construct
EYQRGDRGVV

SEQ ID NO: 128104 - protein, 10 aa, synthetic construct
EYDRGDRGVV

SEQ ID NO: 128105 - protein, 10 aa, synthetic construct
EYERGDRGVV

SEQ ID NO: 128106 - protein, 10 aa, synthetic construct
ENGRGDRGVV

SEQ ID NO: 128107 - protein, 10 aa, synthetic construct
ENARGDRGVV

SEQ ID NO: 128108 - protein, 10 aa, synthetic construct
ENVRGDRGVV

SEQ ID NO: 128109 - protein, 10 aa, synthetic construct
ENPRGDRGVV

SEQ ID NO: 128110 - protein, 10 aa, synthetic construct
ENLRGDRGVV

SEQ ID NO: 128111 - protein, 10 aa, synthetic construct
ENIRGDRGVV

SEQ ID NO: 128112 - protein, 10 aa, synthetic construct
ENMRGDRGVV

SEQ ID NO: 128113 - protein, 10 aa, synthetic construct
ENWRGDRGVV

SEQ ID NO: 128114 - protein, 10 aa, synthetic construct
ENFRGDRGVV

SEQ ID NO: 128115 - protein, 10 aa, synthetic construct
ENKRGDRGVV

SEQ ID NO: 128116 - protein, 10 aa, synthetic construct
ENRRGDRGVV

SEQ ID NO: 128117 - protein, 10 aa, synthetic construct
ENHRGDRGVV

SEQ ID NO: 128118 - protein, 10 aa, synthetic construct
ENSRGDRGVV

SEQ ID NO: 128119 - protein, 10 aa, synthetic construct
ENTRGDRGVV

SEQ ID NO: 128120 - protein, 10 aa, synthetic construct
ENYRGDRGVV

SEQ ID NO: 128121 - protein, 10 aa, synthetic construct
ENNRGDRGVV

SEQ ID NO: 128122 - protein, 10 aa, synthetic construct
ENQRGDRGVV

SEQ ID NO: 128123 - protein, 10 aa, synthetic construct
ENDRGDRGVV

SEQ ID NO: 128124 - protein, 10 aa, synthetic construct
ENERGDRGVV

SEQ ID NO: 128125 - protein, 10 aa, synthetic construct
EQGRGDRGVV

SEQ ID NO: 128126 - protein, 10 aa, synthetic construct
EQARGDRGVV

SEQ ID NO: 128127 - protein, 10 aa, synthetic construct
EQVRGDRGVV

SEQ ID NO: 128128 - protein, 10 aa, synthetic construct
EQPRGDRGVV

SEQ ID NO: 128129 - protein, 10 aa, synthetic construct
EQLRGDRGVV

SEQ ID NO: 128130 - protein, 10 aa, synthetic construct
EQIRGDRGVV

SEQ ID NO: 128131 - protein, 10 aa, synthetic construct
EQMRGDRGVV

SEQ ID NO: 128132 - protein, 10 aa, synthetic construct
EQWRGDRGVV

SEQ ID NO: 128133 - protein, 10 aa, synthetic construct
EQFRGDRGVV

SEQ ID NO: 128134 - protein, 10 aa, synthetic construct
EQKRGDRGVV

SEQ ID NO: 128135 - protein, 10 aa, synthetic construct
EQRRGDRGVV

SEQ ID NO: 128136 - protein, 10 aa, synthetic construct
EQHRGDRGVV

SEQ ID NO: 128137 - protein, 10 aa, synthetic construct
EQSRGDRGVV

SEQ ID NO: 128138 - protein, 10 aa, synthetic construct
EQTRGDRGVV

SEQ ID NO: 128139 - protein, 10 aa, synthetic construct
EQYRGDRGVV

SEQ ID NO: 128140 - protein, 10 aa, synthetic construct
EQNRGDRGVV

SEQ ID NO: 128141 - protein, 10 aa, synthetic construct
EQQRGDRGVV

SEQ ID NO: 128142 - protein, 10 aa, synthetic construct
EQDRGDRGVV

SEQ ID NO: 128143 - protein, 10 aa, synthetic construct
EQERGDRGVV

SEQ ID NO: 128144 - protein, 10 aa, synthetic construct
EDGRGDRGVV

SEQ ID NO: 128145 - protein, 10 aa, synthetic construct
EDARGDRGVV

SEQ ID NO: 128146 - protein, 10 aa, synthetic construct
EDVRGDRGVV

SEQ ID NO: 128147 - protein, 10 aa, synthetic construct
EDPRGDRGVV

SEQ ID NO: 128148 - protein, 10 aa, synthetic construct
EDLRGDRGVV

SEQ ID NO: 128149 - protein, 10 aa, synthetic construct
EDIRGDRGVV

SEQ ID NO: 128150 - protein, 10 aa, synthetic construct
EDMRGDRGVV

SEQ ID NO: 128151 - protein, 10 aa, synthetic construct
EDWRGDRGVV

SEQ ID NO: 128152 - protein, 10 aa, synthetic construct
EDFRGDRGVV

SEQ ID NO: 128153 - protein, 10 aa, synthetic construct
EDKRGDRGVV

SEQ ID NO: 128154 - protein, 10 aa, synthetic construct
EDRRGDRGVV

SEQ ID NO: 128155 - protein, 10 aa, synthetic construct
EDHRGDRGVV

SEQ ID NO: 128156 - protein, 10 aa, synthetic construct
EDSRGDRGVV

SEQ ID NO: 128157 - protein, 10 aa, synthetic construct
EDTRGDRGVV

SEQ ID NO: 128158 - protein, 10 aa, synthetic construct
EDYRGDRGVV

SEQ ID NO: 128159 - protein, 10 aa, synthetic construct
EDNRGDRGVV

SEQ ID NO: 128160 - protein, 10 aa, synthetic construct
EDQRGDRGVV

SEQ ID NO: 128161 - protein, 10 aa, synthetic construct
EDDRGDRGVV

SEQ ID NO: 128162 - protein, 10 aa, synthetic construct
EDERGDRGVV

SEQ ID NO: 128163 - protein, 10 aa, synthetic construct
EEGRGDRGVV

SEQ ID NO: 128164 - protein, 10 aa, synthetic construct
EEARGDRGVV

SEQ ID NO: 128165 - protein, 10 aa, synthetic construct
EEVRGDRGVV

SEQ ID NO: 128166 - protein, 10 aa, synthetic construct
EEPRGDRGVV

SEQ ID NO: 128167 - protein, 10 aa, synthetic construct
EELRGDRGVV

SEQ ID NO: 128168 - protein, 10 aa, synthetic construct
EEIRGDRGVV

SEQ ID NO: 128169 - protein, 10 aa, synthetic construct
EEMRGDRGVV

SEQ ID NO: 128170 - protein, 10 aa, synthetic construct
EEWRGDRGVV

SEQ ID NO: 128171 - protein, 10 aa, synthetic construct
EEFRGDRGVV

SEQ ID NO: 128172 - protein, 10 aa, synthetic construct
EEKRGDRGVV

SEQ ID NO: 128173 - protein, 10 aa, synthetic construct
EERRGDRGVV

SEQ ID NO: 128174 - protein, 10 aa, synthetic construct
EEHRGDRGVV

SEQ ID NO: 128175 - protein, 10 aa, synthetic construct
EESRGDRGVV

SEQ ID NO: 128176 - protein, 10 aa, synthetic construct
EETRGDRGVV

SEQ ID NO: 128177 - protein, 10 aa, synthetic construct
EEYRGDRGVV

SEQ ID NO: 128178 - protein, 10 aa, synthetic construct
EENRGDRGVV

SEQ ID NO: 128179 - protein, 10 aa, synthetic construct
EEQRGDRGVV

SEQ ID NO: 128180 - protein, 10 aa, synthetic construct
EEDRGDRGVV

SEQ ID NO: 128181 - protein, 10 aa, synthetic construct
EEERGDRGVV

SEQ ID NO: 128182 - protein, 10 aa, synthetic construct
NGGRGDRGVV

SEQ ID NO: 128183 - protein, 10 aa, synthetic construct
NGARGDRGVV

SEQ ID NO: 128184 - protein, 10 aa, synthetic construct
NGVRGDRGVV

SEQ ID NO: 128185 - protein, 10 aa, synthetic construct
NGPRGDRGVV

SEQ ID NO: 128186 - protein, 10 aa, synthetic construct
NGLRGDRGVV

SEQ ID NO: 128187 - protein, 10 aa, synthetic construct
NGIRGDRGVV

SEQ ID NO: 128188 - protein, 10 aa, synthetic construct
NGMRGDRGVV

SEQ ID NO: 128189 - protein, 10 aa, synthetic construct
NGWRGDRGVV

SEQ ID NO: 128190 - protein, 10 aa, synthetic construct
NGFRGDRGVV

SEQ ID NO: 128191 - protein, 10 aa, synthetic construct
NGKRGDRGVV

SEQ ID NO: 128192 - protein, 10 aa, synthetic construct
NGRRGDRGVV

SEQ ID NO: 128193 - protein, 10 aa, synthetic construct
NGHRGDRGVV

SEQ ID NO: 128194 - protein, 10 aa, synthetic construct
NGSRGDRGVV

SEQ ID NO: 128195 - protein, 10 aa, synthetic construct
NGTRGDRGVV

SEQ ID NO: 128196 - protein, 10 aa, synthetic construct
NGYRGDRGVV

SEQ ID NO: 128197 - protein, 10 aa, synthetic construct
NGNRGDRGVV

SEQ ID NO: 128198 - protein, 10 aa, synthetic construct
NGQRGDRGVV

SEQ ID NO: 128199 - protein, 10 aa, synthetic construct
NGDRGDRGVV

SEQ ID NO: 128200 - protein, 10 aa, synthetic construct
NGERGDRGVV

SEQ ID NO: 128201 - protein, 10 aa, synthetic construct
NAGRGDRGVV

SEQ ID NO: 128202 - protein, 10 aa, synthetic construct
NAARGDRGVV

SEQ ID NO: 128203 - protein, 10 aa, synthetic construct
NAVRGDRGVV

SEQ ID NO: 128204 - protein, 10 aa, synthetic construct
NAPRGDRGVV

SEQ ID NO: 128205 - protein, 10 aa, synthetic construct
NALRGDRGVV

SEQ ID NO: 128206 - protein, 10 aa, synthetic construct
NAIRGDRGVV

SEQ ID NO: 128207 - protein, 10 aa, synthetic construct
NAMRGDRGVV

SEQ ID NO: 128208 - protein, 10 aa, synthetic construct
NAWRGDRGVV

SEQ ID NO: 128209 - protein, 10 aa, synthetic construct
NAFRGDRGVV

SEQ ID NO: 128210 - protein, 10 aa, synthetic construct
NAKRGDRGVV

SEQ ID NO: 128211 - protein, 10 aa, synthetic construct
NARRGDRGVV

SEQ ID NO: 128212 - protein, 10 aa, synthetic construct
NAHRGDRGVV

SEQ ID NO: 128213 - protein, 10 aa, synthetic construct
NASRGDRGVV

SEQ ID NO: 128214 - protein, 10 aa, synthetic construct
NATRGDRGVV

SEQ ID NO: 128215 - protein, 10 aa, synthetic construct
NAYRGDRGVV

SEQ ID NO: 128216 - protein, 10 aa, synthetic construct
NANRGDRGVV

SEQ ID NO: 128217 - protein, 10 aa, synthetic construct
NAQRGDRGVV

SEQ ID NO: 128218 - protein, 10 aa, synthetic construct
NADRGDRGVV

SEQ ID NO: 128219 - protein, 10 aa, synthetic construct
NAERGDRGVV

SEQ ID NO: 128220 - protein, 10 aa, synthetic construct
NVGRGDRGVV

SEQ ID NO: 128221 - protein, 10 aa, synthetic construct
NVARGDRGVV

SEQ ID NO: 128222 - protein, 10 aa, synthetic construct
NVVRGDRGVV

SEQ ID NO: 128223 - protein, 10 aa, synthetic construct
NVPRGDRGVV

SEQ ID NO: 128224 - protein, 10 aa, synthetic construct
NVLRGDRGVV

SEQ ID NO: 128225 - protein, 10 aa, synthetic construct
NVIRGDRGVV

SEQ ID NO: 128226 - protein, 10 aa, synthetic construct
NVMRGDRGVV

SEQ ID NO: 128227 - protein, 10 aa, synthetic construct
NVWRGDRGVV

SEQ ID NO: 128228 - protein, 10 aa, synthetic construct
NVFRGDRGVV

SEQ ID NO: 128229 - protein, 10 aa, synthetic construct
NVKRGDRGVV

SEQ ID NO: 128230 - protein, 10 aa, synthetic construct
NVRRGDRGVV

SEQ ID NO: 128231 - protein, 10 aa, synthetic construct
NVHRGDRGVV

SEQ ID NO: 128232 - protein, 10 aa, synthetic construct
NVSRGDRGVV

SEQ ID NO: 128233 - protein, 10 aa, synthetic construct
NVTRGDRGVV

SEQ ID NO: 128234 - protein, 10 aa, synthetic construct
NVYRGDRGVV

SEQ ID NO: 128235 - protein, 10 aa, synthetic construct
NVNRGDRGVV

SEQ ID NO: 128236 - protein, 10 aa, synthetic construct
NVQRGDRGVV

SEQ ID NO: 128237 - protein, 10 aa, synthetic construct
NVDRGDRGVV

SEQ ID NO: 128238 - protein, 10 aa, synthetic construct
NVERGDRGVV

SEQ ID NO: 128239 - protein, 10 aa, synthetic construct
NPGRGDRGVV

SEQ ID NO: 128240 - protein, 10 aa, synthetic construct
NPARGDRGVV

SEQ ID NO: 128241 - protein, 10 aa, synthetic construct
NPVRGDRGVV

SEQ ID NO: 128242 - protein, 10 aa, synthetic construct
NPPRGDRGVV

SEQ ID NO: 128243 - protein, 10 aa, synthetic construct
NPLRGDRGVV

SEQ ID NO: 128244 - protein, 10 aa, synthetic construct
NPIRGDRGVV

SEQ ID NO: 128245 - protein, 10 aa, synthetic construct
NPMRGDRGVV

SEQ ID NO: 128246 - protein, 10 aa, synthetic construct
NPWRGDRGVV

SEQ ID NO: 128247 - protein, 10 aa, synthetic construct
NPFRGDRGVV

SEQ ID NO: 128248 - protein, 10 aa, synthetic construct
NPKRGDRGVV

SEQ ID NO: 128249 - protein, 10 aa, synthetic construct
NPRRGDRGVV

SEQ ID NO: 128250 - protein, 10 aa, synthetic construct
NPHRGDRGVV

SEQ ID NO: 128251 - protein, 10 aa, synthetic construct
NPSRGDRGVV

SEQ ID NO: 128252 - protein, 10 aa, synthetic construct
NPTRGDRGVV

SEQ ID NO: 128253 - protein, 10 aa, synthetic construct
NPYRGDRGVV

SEQ ID NO: 128254 - protein, 10 aa, synthetic construct
NPNRGDRGVV

SEQ ID NO: 128255 - protein, 10 aa, synthetic construct
NPQRGDRGVV

SEQ ID NO: 128256 - protein, 10 aa, synthetic construct
NPDRGDRGVV

SEQ ID NO: 128257 - protein, 10 aa, synthetic construct
NPERGDRGVV

SEQ ID NO: 128258 - protein, 10 aa, synthetic construct
NLGRGDRGVV

SEQ ID NO: 128259 - protein, 10 aa, synthetic construct
NLARGDRGVV

SEQ ID NO: 128260 - protein, 10 aa, synthetic construct
NLVRGDRGVV

SEQ ID NO: 128261 - protein, 10 aa, synthetic construct
NLPRGDRGVV

SEQ ID NO: 128262 - protein, 10 aa, synthetic construct
NLLRGDRGVV

SEQ ID NO: 128263 - protein, 10 aa, synthetic construct
NLIRGDRGVV

SEQ ID NO: 128264 - protein, 10 aa, synthetic construct
NLMRGDRGVV

SEQ ID NO: 128265 - protein, 10 aa, synthetic construct
NLWRGDRGVV

SEQ ID NO: 128266 - protein, 10 aa, synthetic construct
NLFRGDRGVV

SEQ ID NO: 128267 - protein, 10 aa, synthetic construct
NLKRGDRGVV

SEQ ID NO: 128268 - protein, 10 aa, synthetic construct
NLRRGDRGVV

SEQ ID NO: 128269 - protein, 10 aa, synthetic construct
NLHRGDRGVV

SEQ ID NO: 128270 - protein, 10 aa, synthetic construct
NLSRGDRGVV

SEQ ID NO: 128271 - protein, 10 aa, synthetic construct
NLTRGDRGVV

SEQ ID NO: 128272 - protein, 10 aa, synthetic construct
NLYRGDRGVV

SEQ ID NO: 128273 - protein, 10 aa, synthetic construct
NLNRGDRGVV

SEQ ID NO: 128274 - protein, 10 aa, synthetic construct
NLQRGDRGVV

SEQ ID NO: 128275 - protein, 10 aa, synthetic construct
NLDRGDRGVV

SEQ ID NO: 128276 - protein, 10 aa, synthetic construct
NLERGDRGVV

SEQ ID NO: 128277 - protein, 10 aa, synthetic construct
NIGRGDRGVV

SEQ ID NO: 128278 - protein, 10 aa, synthetic construct
NIARGDRGVV

SEQ ID NO: 128279 - protein, 10 aa, synthetic construct
NIVRGDRGVV

SEQ ID NO: 128280 - protein, 10 aa, synthetic construct
NIPRGDRGVV

SEQ ID NO: 128281 - protein, 10 aa, synthetic construct
NILRGDRGVV

SEQ ID NO: 128282 - protein, 10 aa, synthetic construct
NIIRGDRGVV

SEQ ID NO: 128283 - protein, 10 aa, synthetic construct
NIMRGDRGVV

SEQ ID NO: 128284 - protein, 10 aa, synthetic construct
NIWRGDRGVV

SEQ ID NO: 128285 - protein, 10 aa, synthetic construct
NIFRGDRGVV

SEQ ID NO: 128286 - protein, 10 aa, synthetic construct
NIKRGDRGVV

SEQ ID NO: 128287 - protein, 10 aa, synthetic construct
NIRRGDRGVV

SEQ ID NO: 128288 - protein, 10 aa, synthetic construct
NIHRGDRGVV

SEQ ID NO: 128289 - protein, 10 aa, synthetic construct
NISRGDRGVV

SEQ ID NO: 128290 - protein, 10 aa, synthetic construct
NITRGDRGVV

SEQ ID NO: 128291 - protein, 10 aa, synthetic construct
NIYRGDRGVV

SEQ ID NO: 128292 - protein, 10 aa, synthetic construct
NINRGDRGVV

SEQ ID NO: 128293 - protein, 10 aa, synthetic construct
NIQRGDRGVV

SEQ ID NO: 128294 - protein, 10 aa, synthetic construct
NIDRGDRGVV

SEQ ID NO: 128295 - protein, 10 aa, synthetic construct
NIERGDRGVV

SEQ ID NO: 128296 - protein, 10 aa, synthetic construct
NMGRGDRGVV

SEQ ID NO: 128297 - protein, 10 aa, synthetic construct
NMARGDRGVV

SEQ ID NO: 128298 - protein, 10 aa, synthetic construct
NMVRGDRGVV

SEQ ID NO: 128299 - protein, 10 aa, synthetic construct
NMPRGDRGVV

SEQ ID NO: 128300 - protein, 10 aa, synthetic construct
NMLRGDRGVV

SEQ ID NO: 128301 - protein, 10 aa, synthetic construct
NMIRGDRGVV

SEQ ID NO: 128302 - protein, 10 aa, synthetic construct
NMMRGDRGVV

SEQ ID NO: 128303 - protein, 10 aa, synthetic construct
NMWRGDRGVV

SEQ ID NO: 128304 - protein, 10 aa, synthetic construct
NMFRGDRGVV

SEQ ID NO: 128305 - protein, 10 aa, synthetic construct
NMKRGDRGVV

SEQ ID NO: 128306 - protein, 10 aa, synthetic construct
NMRRGDRGVV

SEQ ID NO: 128307 - protein, 10 aa, synthetic construct
NMHRGDRGVV

SEQ ID NO: 128308 - protein, 10 aa, synthetic construct
NMSRGDRGVV

SEQ ID NO: 128309 - protein, 10 aa, synthetic construct
NMTRGDRGVV

SEQ ID NO: 128310 - protein, 10 aa, synthetic construct
NMYRGDRGVV

SEQ ID NO: 128311 - protein, 10 aa, synthetic construct
NMNRGDRGVV

SEQ ID NO: 128312 - protein, 10 aa, synthetic construct
NMQRGDRGVV

SEQ ID NO: 128313 - protein, 10 aa, synthetic construct
NMDRGDRGVV

SEQ ID NO: 128314 - protein, 10 aa, synthetic construct
NMERGDRGVV

SEQ ID NO: 128315 - protein, 10 aa, synthetic construct
NWGRGDRGVV

SEQ ID NO: 128316 - protein, 10 aa, synthetic construct
NWARGDRGVV

SEQ ID NO: 128317 - protein, 10 aa, synthetic construct
NWVRGDRGVV

SEQ ID NO: 128318 - protein, 10 aa, synthetic construct
NWPRGDRGVV

SEQ ID NO: 128319 - protein, 10 aa, synthetic construct
NWLRGDRGVV

SEQ ID NO: 128320 - protein, 10 aa, synthetic construct
NWIRGDRGVV

SEQ ID NO: 128321 - protein, 10 aa, synthetic construct
NWMRGDRGVV

SEQ ID NO: 128322 - protein, 10 aa, synthetic construct
NWWRGDRGVV

SEQ ID NO: 128323 - protein, 10 aa, synthetic construct
NWFRGDRGVV

SEQ ID NO: 128324 - protein, 10 aa, synthetic construct
NWKRGDRGVV

SEQ ID NO: 128325 - protein, 10 aa, synthetic construct
NWRRGDRGVV

SEQ ID NO: 128326 - protein, 10 aa, synthetic construct
NWHRGDRGVV

SEQ ID NO: 128327 - protein, 10 aa, synthetic construct
NWSRGDRGVV

SEQ ID NO: 128328 - protein, 10 aa, synthetic construct
NWTRGDRGVV

SEQ ID NO: 128329 - protein, 10 aa, synthetic construct
NWYRGDRGVV

SEQ ID NO: 128330 - protein, 10 aa, synthetic construct
NWNRGDRGVV

SEQ ID NO: 128331 - protein, 10 aa, synthetic construct
NWQRGDRGVV

SEQ ID NO: 128332 - protein, 10 aa, synthetic construct
NWDRGDRGVV

SEQ ID NO: 128333 - protein, 10 aa, synthetic construct
NWERGDRGVV

SEQ ID NO: 128334 - protein, 10 aa, synthetic construct
NFGRGDRGVV

SEQ ID NO: 128335 - protein, 10 aa, synthetic construct
NFARGDRGVV

SEQ ID NO: 128336 - protein, 10 aa, synthetic construct
NFVRGDRGVV

SEQ ID NO: 128337 - protein, 10 aa, synthetic construct
NFPRGDRGVV

SEQ ID NO: 128338 - protein, 10 aa, synthetic construct
NFLRGDRGVV

SEQ ID NO: 128339 - protein, 10 aa, synthetic construct
NFIRGDRGVV

SEQ ID NO: 128340 - protein, 10 aa, synthetic construct
NFMRGDRGVV

SEQ ID NO: 128341 - protein, 10 aa, synthetic construct
NFWRGDRGVV

SEQ ID NO: 128342 - protein, 10 aa, synthetic construct
NFFRGDRGVV

SEQ ID NO: 128343 - protein, 10 aa, synthetic construct
NFKRGDRGVV

SEQ ID NO: 128344 - protein, 10 aa, synthetic construct
NFRRGDRGVV

SEQ ID NO: 128345 - protein, 10 aa, synthetic construct
NFHRGDRGVV

SEQ ID NO: 128346 - protein, 10 aa, synthetic construct
NFSRGDRGVV

SEQ ID NO: 128347 - protein, 10 aa, synthetic construct
NFTRGDRGVV

SEQ ID NO: 128348 - protein, 10 aa, synthetic construct
NFYRGDRGVV

SEQ ID NO: 128349 - protein, 10 aa, synthetic construct
NFNRGDRGVV

SEQ ID NO: 128350 - protein, 10 aa, synthetic construct
NFQRGDRGVV

SEQ ID NO: 128351 - protein, 10 aa, synthetic construct
NFDRGDRGVV

SEQ ID NO: 128352 - protein, 10 aa, synthetic construct
NFERGDRGVV

SEQ ID NO: 128353 - protein, 10 aa, synthetic construct
NKGRGDRGVV

SEQ ID NO: 128354 - protein, 10 aa, synthetic construct
NKARGDRGVV

SEQ ID NO: 128355 - protein, 10 aa, synthetic construct
NKVRGDRGVV

SEQ ID NO: 128356 - protein, 10 aa, synthetic construct
NKPRGDRGVV

SEQ ID NO: 128357 - protein, 10 aa, synthetic construct
NKLRGDRGVV

SEQ ID NO: 128358 - protein, 10 aa, synthetic construct
NKIRGDRGVV

SEQ ID NO: 128359 - protein, 10 aa, synthetic construct
NKMRGDRGVV

SEQ ID NO: 128360 - protein, 10 aa, synthetic construct
NKWRGDRGVV

SEQ ID NO: 128361 - protein, 10 aa, synthetic construct
NKFRGDRGVV

SEQ ID NO: 128362 - protein, 10 aa, synthetic construct
NKKRGDRGVV

SEQ ID NO: 128363 - protein, 10 aa, synthetic construct
NKRRGDRGVV

SEQ ID NO: 128364 - protein, 10 aa, synthetic construct
NKHRGDRGVV

SEQ ID NO: 128365 - protein, 10 aa, synthetic construct
NKSRGDRGVV

SEQ ID NO: 128366 - protein, 10 aa, synthetic construct
NKTRGDRGVV

SEQ ID NO: 128367 - protein, 10 aa, synthetic construct
NKYRGDRGVV

SEQ ID NO: 128368 - protein, 10 aa, synthetic construct
NKNRGDRGVV

SEQ ID NO: 128369 - protein, 10 aa, synthetic construct
NKQRGDRGVV

SEQ ID NO: 128370 - protein, 10 aa, synthetic construct
NKDRGDRGVV

SEQ ID NO: 128371 - protein, 10 aa, synthetic construct
NKERGDRGVV

SEQ ID NO: 128372 - protein, 10 aa, synthetic construct
NRGRGDRGVV

SEQ ID NO: 128373 - protein, 10 aa, synthetic construct
NRARGDRGVV

SEQ ID NO: 128374 - protein, 10 aa, synthetic construct
NRVRGDRGVV

SEQ ID NO: 128375 - protein, 10 aa, synthetic construct
NRPRGDRGVV

SEQ ID NO: 128376 - protein, 10 aa, synthetic construct
NRLRGDRGVV

SEQ ID NO: 128377 - protein, 10 aa, synthetic construct
NRIRGDRGVV

SEQ ID NO: 128378 - protein, 10 aa, synthetic construct
NRMRGDRGVV

SEQ ID NO: 128379 - protein, 10 aa, synthetic construct
NRWRGDRGVV

SEQ ID NO: 128380 - protein, 10 aa, synthetic construct
NRFRGDRGVV

SEQ ID NO: 128381 - protein, 10 aa, synthetic construct
NRKRGDRGVV

SEQ ID NO: 128382 - protein, 10 aa, synthetic construct
NRRRGDRGVV

SEQ ID NO: 128383 - protein, 10 aa, synthetic construct
NRHRGDRGVV

SEQ ID NO: 128384 - protein, 10 aa, synthetic construct
NRSRGDRGVV

SEQ ID NO: 128385 - protein, 10 aa, synthetic construct
NRTRGDRGVV

SEQ ID NO: 128386 - protein, 10 aa, synthetic construct
NRYRGDRGVV

SEQ ID NO: 128387 - protein, 10 aa, synthetic construct
NRNRGDRGVV

SEQ ID NO: 128388 - protein, 10 aa, synthetic construct
NRQRGDRGVV

SEQ ID NO: 128389 - protein, 10 aa, synthetic construct
NRDRGDRGVV

SEQ ID NO: 128390 - protein, 10 aa, synthetic construct
NRERGDRGVV

SEQ ID NO: 128391 - protein, 10 aa, synthetic construct
NHGRGDRGVV

SEQ ID NO: 128392 - protein, 10 aa, synthetic construct
NHARGDRGVV

SEQ ID NO: 128393 - protein, 10 aa, synthetic construct
NHVRGDRGVV

SEQ ID NO: 128394 - protein, 10 aa, synthetic construct
NHPRGDRGVV

SEQ ID NO: 128395 - protein, 10 aa, synthetic construct
NHLRGDRGVV

SEQ ID NO: 128396 - protein, 10 aa, synthetic construct
NHIRGDRGVV

SEQ ID NO: 128397 - protein, 10 aa, synthetic construct
NHMRGDRGVV

SEQ ID NO: 128398 - protein, 10 aa, synthetic construct
NHWRGDRGVV

SEQ ID NO: 128399 - protein, 10 aa, synthetic construct
NHFRGDRGVV

SEQ ID NO: 128400 - protein, 10 aa, synthetic construct
NHKRGDRGVV

SEQ ID NO: 128401 - protein, 10 aa, synthetic construct
NHRRGDRGVV

SEQ ID NO: 128402 - protein, 10 aa, synthetic construct
NHHRGDRGVV

SEQ ID NO: 128403 - protein, 10 aa, synthetic construct
NHSRGDRGVV

SEQ ID NO: 128404 - protein, 10 aa, synthetic construct
NHTRGDRGVV

SEQ ID NO: 128405 - protein, 10 aa, synthetic construct
NHYRGDRGVV

SEQ ID NO: 128406 - protein, 10 aa, synthetic construct
NHNRGDRGVV

SEQ ID NO: 128407 - protein, 10 aa, synthetic construct
NHQRGDRGVV

SEQ ID NO: 128408 - protein, 10 aa, synthetic construct
NHDRGDRGVV

SEQ ID NO: 128409 - protein, 10 aa, synthetic construct
NHERGDRGVV

SEQ ID NO: 128410 - protein, 10 aa, synthetic construct
NSGRGDRGVV

SEQ ID NO: 128411 - protein, 10 aa, synthetic construct
NSARGDRGVV

SEQ ID NO: 128412 - protein, 10 aa, synthetic construct
NSVRGDRGVV

SEQ ID NO: 128413 - protein, 10 aa, synthetic construct
NSPRGDRGVV

SEQ ID NO: 128414 - protein, 10 aa, synthetic construct
NSLRGDRGVV

SEQ ID NO: 128415 - protein, 10 aa, synthetic construct
NSIRGDRGVV

SEQ ID NO: 128416 - protein, 10 aa, synthetic construct
NSMRGDRGVV

SEQ ID NO: 128417 - protein, 10 aa, synthetic construct
NSWRGDRGVV

SEQ ID NO: 128418 - protein, 10 aa, synthetic construct
NSFRGDRGVV

SEQ ID NO: 128419 - protein, 10 aa, synthetic construct
NSKRGDRGVV

SEQ ID NO: 128420 - protein, 10 aa, synthetic construct
NSRRGDRGVV

SEQ ID NO: 128421 - protein, 10 aa, synthetic construct
NSHRGDRGVV

SEQ ID NO: 128422 - protein, 10 aa, synthetic construct
NSSRGDRGVV

SEQ ID NO: 128423 - protein, 10 aa, synthetic construct
NSTRGDRGVV

SEQ ID NO: 128424 - protein, 10 aa, synthetic construct
NSYRGDRGVV

SEQ ID NO: 128425 - protein, 10 aa, synthetic construct
NSNRGDRGVV

SEQ ID NO: 128426 - protein, 10 aa, synthetic construct
NSQRGDRGVV

SEQ ID NO: 128427 - protein, 10 aa, synthetic construct
NSDRGDRGVV

SEQ ID NO: 128428 - protein, 10 aa, synthetic construct
NSERGDRGVV

SEQ ID NO: 128429 - protein, 10 aa, synthetic construct
NTGRGDRGVV

SEQ ID NO: 128430 - protein, 10 aa, synthetic construct
NTARGDRGVV

SEQ ID NO: 128431 - protein, 10 aa, synthetic construct
NTVRGDRGVV

SEQ ID NO: 128432 - protein, 10 aa, synthetic construct
NTPRGDRGVV

SEQ ID NO: 128433 - protein, 10 aa, synthetic construct
NTLRGDRGVV

SEQ ID NO: 128434 - protein, 10 aa, synthetic construct
NTIRGDRGVV

SEQ ID NO: 128435 - protein, 10 aa, synthetic construct
NTMRGDRGVV

SEQ ID NO: 128436 - protein, 10 aa, synthetic construct
NTWRGDRGVV

SEQ ID NO: 128437 - protein, 10 aa, synthetic construct
NTFRGDRGVV

SEQ ID NO: 128438 - protein, 10 aa, synthetic construct
NTKRGDRGVV

SEQ ID NO: 128439 - protein, 10 aa, synthetic construct
NTRRGDRGVV

SEQ ID NO: 128440 - protein, 10 aa, synthetic construct
NTHRGDRGVV

SEQ ID NO: 128441 - protein, 10 aa, synthetic construct
NTSRGDRGVV

SEQ ID NO: 128442 - protein, 10 aa, synthetic construct
NTTRGDRGVV

SEQ ID NO: 128443 - protein, 10 aa, synthetic construct
NTYRGDRGVV

SEQ ID NO: 128444 - protein, 10 aa, synthetic construct
NTNRGDRGVV

SEQ ID NO: 128445 - protein, 10 aa, synthetic construct
NTQRGDRGVV

SEQ ID NO: 128446 - protein, 10 aa, synthetic construct
NTDRGDRGVV

SEQ ID NO: 128447 - protein, 10 aa, synthetic construct
NTERGDRGVV

SEQ ID NO: 128448 - protein, 10 aa, synthetic construct
NYGRGDRGVV

SEQ ID NO: 128449 - protein, 10 aa, synthetic construct
NYARGDRGVV

SEQ ID NO: 128450 - protein, 10 aa, synthetic construct
NYVRGDRGVV

SEQ ID NO: 128451 - protein, 10 aa, synthetic construct
NYPRGDRGVV

SEQ ID NO: 128452 - protein, 10 aa, synthetic construct
NYLRGDRGVV

SEQ ID NO: 128453 - protein, 10 aa, synthetic construct
NYIRGDRGVV

SEQ ID NO: 128454 - protein, 10 aa, synthetic construct
NYMRGDRGVV

SEQ ID NO: 128455 - protein, 10 aa, synthetic construct
NYWRGDRGVV

SEQ ID NO: 128456 - protein, 10 aa, synthetic construct
NYFRGDRGVV

SEQ ID NO: 128457 - protein, 10 aa, synthetic construct
NYKRGDRGVV

SEQ ID NO: 128458 - protein, 10 aa, synthetic construct
NYRRGDRGVV

SEQ ID NO: 128459 - protein, 10 aa, synthetic construct
NYHRGDRGVV

SEQ ID NO: 128460 - protein, 10 aa, synthetic construct
NYSRGDRGVV

SEQ ID NO: 128461 - protein, 10 aa, synthetic construct
NYTRGDRGVV

SEQ ID NO: 128462 - protein, 10 aa, synthetic construct
NYYRGDRGVV

SEQ ID NO: 128463 - protein, 10 aa, synthetic construct
NYNRGDRGVV

SEQ ID NO: 128464 - protein, 10 aa, synthetic construct
NYQRGDRGVV

SEQ ID NO: 128465 - protein, 10 aa, synthetic construct
NYDRGDRGVV

SEQ ID NO: 128466 - protein, 10 aa, synthetic construct
NYERGDRGVV

SEQ ID NO: 128467 - protein, 10 aa, synthetic construct
NNGRGDRGVV

SEQ ID NO: 128468 - protein, 10 aa, synthetic construct
NNARGDRGVV

SEQ ID NO: 128469 - protein, 10 aa, synthetic construct
NNVRGDRGVV

SEQ ID NO: 128470 - protein, 10 aa, synthetic construct
NNPRGDRGVV

SEQ ID NO: 128471 - protein, 10 aa, synthetic construct
NNLRGDRGVV

SEQ ID NO: 128472 - protein, 10 aa, synthetic construct
NNIRGDRGVV

SEQ ID NO: 128473 - protein, 10 aa, synthetic construct
NNMRGDRGVV

SEQ ID NO: 128474 - protein, 10 aa, synthetic construct
NNWRGDRGVV

SEQ ID NO: 128475 - protein, 10 aa, synthetic construct
NNFRGDRGVV

SEQ ID NO: 128476 - protein, 10 aa, synthetic construct
NNKRGDRGVV

SEQ ID NO: 128477 - protein, 10 aa, synthetic construct
NNRRGDRGVV

SEQ ID NO: 128478 - protein, 10 aa, synthetic construct
NNHRGDRGVV

SEQ ID NO: 128479 - protein, 10 aa, synthetic construct
NNSRGDRGVV

SEQ ID NO: 128480 - protein, 10 aa, synthetic construct
NNTRGDRGVV

SEQ ID NO: 128481 - protein, 10 aa, synthetic construct
NNYRGDRGVV

SEQ ID NO: 128482 - protein, 10 aa, synthetic construct
NNNRGDRGVV

SEQ ID NO: 128483 - protein, 10 aa, synthetic construct
NNQRGDRGVV

SEQ ID NO: 128484 - protein, 10 aa, synthetic construct
NNDRGDRGVV

SEQ ID NO: 128485 - protein, 10 aa, synthetic construct
NNERGDRGVV

SEQ ID NO: 128486 - protein, 10 aa, synthetic construct
NQGRGDRGVV

SEQ ID NO: 128487 - protein, 10 aa, synthetic construct
NQARGDRGVV

SEQ ID NO: 128488 - protein, 10 aa, synthetic construct
NQVRGDRGVV

SEQ ID NO: 128489 - protein, 10 aa, synthetic construct
NQPRGDRGVV

SEQ ID NO: 128490 - protein, 10 aa, synthetic construct
NQLRGDRGVV

SEQ ID NO: 128491 - protein, 10 aa, synthetic construct
NQIRGDRGVV

SEQ ID NO: 128492 - protein, 10 aa, synthetic construct
NQMRGDRGVV

SEQ ID NO: 128493 - protein, 10 aa, synthetic construct
NQWRGDRGVV

SEQ ID NO: 128494 - protein, 10 aa, synthetic construct
NQFRGDRGVV

SEQ ID NO: 128495 - protein, 10 aa, synthetic construct
NQKRGDRGVV

SEQ ID NO: 128496 - protein, 10 aa, synthetic construct
NQRRGDRGVV

SEQ ID NO: 128497 - protein, 10 aa, synthetic construct
NQHRGDRGVV

SEQ ID NO: 128498 - protein, 10 aa, synthetic construct
NQSRGDRGVV

SEQ ID NO: 128499 - protein, 10 aa, synthetic construct
NQTRGDRGVV

SEQ ID NO: 128500 - protein, 10 aa, synthetic construct
NQYRGDRGVV

SEQ ID NO: 128501 - protein, 10 aa, synthetic construct
NQNRGDRGVV

SEQ ID NO: 128502 - protein, 10 aa, synthetic construct
NQQRGDRGVV

SEQ ID NO: 128503 - protein, 10 aa, synthetic construct
NQDRGDRGVV

SEQ ID NO: 128504 - protein, 10 aa, synthetic construct
NQERGDRGVV

SEQ ID NO: 128505 - protein, 10 aa, synthetic construct
NDGRGDRGVV

SEQ ID NO: 128506 - protein, 10 aa, synthetic construct
NDARGDRGVV

SEQ ID NO: 128507 - protein, 10 aa, synthetic construct
NDVRGDRGVV

SEQ ID NO: 128508 - protein, 10 aa, synthetic construct
NDPRGDRGVV

SEQ ID NO: 128509 - protein, 10 aa, synthetic construct
NDLRGDRGVV

SEQ ID NO: 128510 - protein, 10 aa, synthetic construct
NDIRGDRGVV

SEQ ID NO: 128511 - protein, 10 aa, synthetic construct
NDMRGDRGVV

SEQ ID NO: 128512 - protein, 10 aa, synthetic construct
NDWRGDRGVV

SEQ ID NO: 128513 - protein, 10 aa, synthetic construct
NDFRGDRGVV

SEQ ID NO: 128514 - protein, 10 aa, synthetic construct
NDKRGDRGVV

SEQ ID NO: 128515 - protein, 10 aa, synthetic construct
NDRRGDRGVV

SEQ ID NO: 128516 - protein, 10 aa, synthetic construct
NDHRGDRGVV

SEQ ID NO: 128517 - protein, 10 aa, synthetic construct
NDSRGDRGVV

SEQ ID NO: 128518 - protein, 10 aa, synthetic construct
NDTRGDRGVV

SEQ ID NO: 128519 - protein, 10 aa, synthetic construct
NDYRGDRGVV

SEQ ID NO: 128520 - protein, 10 aa, synthetic construct
NDNRGDRGVV

SEQ ID NO: 128521 - protein, 10 aa, synthetic construct
NDQRGDRGVV

SEQ ID NO: 128522 - protein, 10 aa, synthetic construct
NDDRGDRGVV

SEQ ID NO: 128523 - protein, 10 aa, synthetic construct
NDERGDRGVV

SEQ ID NO: 128524 - protein, 10 aa, synthetic construct
NEGRGDRGVV

SEQ ID NO: 128525 - protein, 10 aa, synthetic construct
NEARGDRGVV

SEQ ID NO: 128526 - protein, 10 aa, synthetic construct
NEVRGDRGVV

SEQ ID NO: 128527 - protein, 10 aa, synthetic construct
NEPRGDRGVV

SEQ ID NO: 128528 - protein, 10 aa, synthetic construct
NELRGDRGVV

SEQ ID NO: 128529 - protein, 10 aa, synthetic construct
NEIRGDRGVV

SEQ ID NO: 128530 - protein, 10 aa, synthetic construct
NEMRGDRGVV

SEQ ID NO: 128531 - protein, 10 aa, synthetic construct
NEWRGDRGVV

SEQ ID NO: 128532 - protein, 10 aa, synthetic construct
NEFRGDRGVV

SEQ ID NO: 128533 - protein, 10 aa, synthetic construct
NEKRGDRGVV

SEQ ID NO: 128534 - protein, 10 aa, synthetic construct
NERRGDRGVV

SEQ ID NO: 128535 - protein, 10 aa, synthetic construct
NEHRGDRGVV

SEQ ID NO: 128536 - protein, 10 aa, synthetic construct
NESRGDRGVV

SEQ ID NO: 128537 - protein, 10 aa, synthetic construct
NETRGDRGVV

SEQ ID NO: 128538 - protein, 10 aa, synthetic construct
NEYRGDRGVV

SEQ ID NO: 128539 - protein, 10 aa, synthetic construct
NENRGDRGVV

SEQ ID NO: 128540 - protein, 10 aa, synthetic construct
NEQRGDRGVV

SEQ ID NO: 128541 - protein, 10 aa, synthetic construct
NEDRGDRGVV

SEQ ID NO: 128542 - protein, 10 aa, synthetic construct
NEERGDRGVV

SEQ ID NO: 128543 - protein, 10 aa, synthetic construct
DGGRGDRGVV

SEQ ID NO: 128544 - protein, 10 aa, synthetic construct
DGARGDRGVV

SEQ ID NO: 128545 - protein, 10 aa, synthetic construct
DGVRGDRGVV

SEQ ID NO: 128546 - protein, 10 aa, synthetic construct
DGPRGDRGVV

SEQ ID NO: 128547 - protein, 10 aa, synthetic construct
DGLRGDRGVV

SEQ ID NO: 128548 - protein, 10 aa, synthetic construct
DGIRGDRGVV

SEQ ID NO: 128549 - protein, 10 aa, synthetic construct
DGMRGDRGVV

SEQ ID NO: 128550 - protein, 10 aa, synthetic construct
DGWRGDRGVV

SEQ ID NO: 128551 - protein, 10 aa, synthetic construct
DGFRGDRGVV

SEQ ID NO: 128552 - protein, 10 aa, synthetic construct
DGKRGDRGVV

SEQ ID NO: 128553 - protein, 10 aa, synthetic construct
DGRRGDRGVV

SEQ ID NO: 128554 - protein, 10 aa, synthetic construct
DGHRGDRGVV

SEQ ID NO: 128555 - protein, 10 aa, synthetic construct
DGSRGDRGVV

SEQ ID NO: 128556 - protein, 10 aa, synthetic construct
DGTRGDRGVV

SEQ ID NO: 128557 - protein, 10 aa, synthetic construct
DGYRGDRGVV

SEQ ID NO: 128558 - protein, 10 aa, synthetic construct
DGNRGDRGVV

SEQ ID NO: 128559 - protein, 10 aa, synthetic construct
DGQRGDRGVV

SEQ ID NO: 128560 - protein, 10 aa, synthetic construct
DGDRGDRGVV

SEQ ID NO: 128561 - protein, 10 aa, synthetic construct
DGERGDRGVV

SEQ ID NO: 128562 - protein, 10 aa, synthetic construct
DAGRGDRGVV

SEQ ID NO: 128563 - protein, 10 aa, synthetic construct
DAARGDRGVV

SEQ ID NO: 128564 - protein, 10 aa, synthetic construct
DAVRGDRGVV

SEQ ID NO: 128565 - protein, 10 aa, synthetic construct
DAPRGDRGVV

SEQ ID NO: 128566 - protein, 10 aa, synthetic construct
DALRGDRGVV

SEQ ID NO: 128567 - protein, 10 aa, synthetic construct
DAIRGDRGVV

SEQ ID NO: 128568 - protein, 10 aa, synthetic construct
DAMRGDRGVV

SEQ ID NO: 128569 - protein, 10 aa, synthetic construct
DAWRGDRGVV

SEQ ID NO: 128570 - protein, 10 aa, synthetic construct
DAFRGDRGVV

SEQ ID NO: 128571 - protein, 10 aa, synthetic construct
DAKRGDRGVV

SEQ ID NO: 128572 - protein, 10 aa, synthetic construct
DARRGDRGVV

SEQ ID NO: 128573 - protein, 10 aa, synthetic construct
DAHRGDRGVV

SEQ ID NO: 128574 - protein, 10 aa, synthetic construct
DASRGDRGVV

SEQ ID NO: 128575 - protein, 10 aa, synthetic construct
DATRGDRGVV

SEQ ID NO: 128576 - protein, 10 aa, synthetic construct
DAYRGDRGVV

SEQ ID NO: 128577 - protein, 10 aa, synthetic construct
DANRGDRGVV

SEQ ID NO: 128578 - protein, 10 aa, synthetic construct
DAQRGDRGVV

SEQ ID NO: 128579 - protein, 10 aa, synthetic construct
DADRGDRGVV

SEQ ID NO: 128580 - protein, 10 aa, synthetic construct
DAERGDRGVV

SEQ ID NO: 128581 - protein, 10 aa, synthetic construct
DVGRGDRGVV

SEQ ID NO: 128582 - protein, 10 aa, synthetic construct
DVARGDRGVV

SEQ ID NO: 128583 - protein, 10 aa, synthetic construct
DVVRGDRGVV

SEQ ID NO: 128584 - protein, 10 aa, synthetic construct
DVPRGDRGVV

SEQ ID NO: 128585 - protein, 10 aa, synthetic construct
DVLRGDRGVV

SEQ ID NO: 128586 - protein, 10 aa, synthetic construct
DVIRGDRGVV

SEQ ID NO: 128587 - protein, 10 aa, synthetic construct
DVMRGDRGVV

SEQ ID NO: 128588 - protein, 10 aa, synthetic construct
DVWRGDRGVV

SEQ ID NO: 128589 - protein, 10 aa, synthetic construct
DVFRGDRGVV

SEQ ID NO: 128590 - protein, 10 aa, synthetic construct
DVKRGDRGVV

SEQ ID NO: 128591 - protein, 10 aa, synthetic construct
DVRRGDRGVV

SEQ ID NO: 128592 - protein, 10 aa, synthetic construct
DVHRGDRGVV

SEQ ID NO: 128593 - protein, 10 aa, synthetic construct
DVSRGDRGVV

SEQ ID NO: 128594 - protein, 10 aa, synthetic construct
DVTRGDRGVV

SEQ ID NO: 128595 - protein, 10 aa, synthetic construct
DVYRGDRGVV

SEQ ID NO: 128596 - protein, 10 aa, synthetic construct
DVNRGDRGVV

SEQ ID NO: 128597 - protein, 10 aa, synthetic construct
DVQRGDRGVV

SEQ ID NO: 128598 - protein, 10 aa, synthetic construct
DVDRGDRGVV

SEQ ID NO: 128599 - protein, 10 aa, synthetic construct
DVERGDRGVV

SEQ ID NO: 128600 - protein, 10 aa, synthetic construct
DPGRGDRGVV

SEQ ID NO: 128601 - protein, 10 aa, synthetic construct
DPARGDRGVV

SEQ ID NO: 128602 - protein, 10 aa, synthetic construct
DPVRGDRGVV

SEQ ID NO: 128603 - protein, 10 aa, synthetic construct
DPPRGDRGVV

SEQ ID NO: 128604 - protein, 10 aa, synthetic construct
DPLRGDRGVV

SEQ ID NO: 128605 - protein, 10 aa, synthetic construct
DPIRGDRGVV

SEQ ID NO: 128606 - protein, 10 aa, synthetic construct
DPMRGDRGVV

SEQ ID NO: 128607 - protein, 10 aa, synthetic construct
DPWRGDRGVV

SEQ ID NO: 128608 - protein, 10 aa, synthetic construct
DPFRGDRGVV

SEQ ID NO: 128609 - protein, 10 aa, synthetic construct
DPKRGDRGVV

SEQ ID NO: 128610 - protein, 10 aa, synthetic construct
DPRRGDRGVV

SEQ ID NO: 128611 - protein, 10 aa, synthetic construct
DPHRGDRGVV

SEQ ID NO: 128612 - protein, 10 aa, synthetic construct
DPSRGDRGVV

SEQ ID NO: 128613 - protein, 10 aa, synthetic construct
DPTRGDRGVV

SEQ ID NO: 128614 - protein, 10 aa, synthetic construct
DPYRGDRGVV

SEQ ID NO: 128615 - protein, 10 aa, synthetic construct
DPNRGDRGVV

SEQ ID NO: 128616 - protein, 10 aa, synthetic construct
DPQRGDRGVV

SEQ ID NO: 128617 - protein, 10 aa, synthetic construct
DPDRGDRGVV

SEQ ID NO: 128618 - protein, 10 aa, synthetic construct
DPERGDRGVV

SEQ ID NO: 128619 - protein, 10 aa, synthetic construct
DLGRGDRGVV

SEQ ID NO: 128620 - protein, 10 aa, synthetic construct
DLARGDRGVV

SEQ ID NO: 128621 - protein, 10 aa, synthetic construct
DLVRGDRGVV

SEQ ID NO: 128622 - protein, 10 aa, synthetic construct
DLPRGDRGVV

SEQ ID NO: 128623 - protein, 10 aa, synthetic construct
DLLRGDRGVV

SEQ ID NO: 128624 - protein, 10 aa, synthetic construct
DLIRGDRGVV

SEQ ID NO: 128625 - protein, 10 aa, synthetic construct
DLMRGDRGVV

SEQ ID NO: 128626 - protein, 10 aa, synthetic construct
DLWRGDRGVV

SEQ ID NO: 128627 - protein, 10 aa, synthetic construct
DLFRGDRGVV

SEQ ID NO: 128628 - protein, 10 aa, synthetic construct
DLKRGDRGVV

SEQ ID NO: 128629 - protein, 10 aa, synthetic construct
DLRRGDRGVV

SEQ ID NO: 128630 - protein, 10 aa, synthetic construct
DLHRGDRGVV

SEQ ID NO: 128631 - protein, 10 aa, synthetic construct
DLSRGDRGVV

SEQ ID NO: 128632 - protein, 10 aa, synthetic construct
DLTRGDRGVV

SEQ ID NO: 128633 - protein, 10 aa, synthetic construct
DLYRGDRGVV

SEQ ID NO: 128634 - protein, 10 aa, synthetic construct
DLNRGDRGVV

SEQ ID NO: 128635 - protein, 10 aa, synthetic construct
DLQRGDRGVV

SEQ ID NO: 128636 - protein, 10 aa, synthetic construct
DLDRGDRGVV

SEQ ID NO: 128637 - protein, 10 aa, synthetic construct
DLERGDRGVV

SEQ ID NO: 128638 - protein, 10 aa, synthetic construct
DIGRGDRGVV

SEQ ID NO: 128639 - protein, 10 aa, synthetic construct
DIARGDRGVV

SEQ ID NO: 128640 - protein, 10 aa, synthetic construct
DIVRGDRGVV

SEQ ID NO: 128641 - protein, 10 aa, synthetic construct
DIPRGDRGVV

SEQ ID NO: 128642 - protein, 10 aa, synthetic construct
DILRGDRGVV

SEQ ID NO: 128643 - protein, 10 aa, synthetic construct
DIIRGDRGVV

SEQ ID NO: 128644 - protein, 10 aa, synthetic construct
DIMRGDRGVV

SEQ ID NO: 128645 - protein, 10 aa, synthetic construct
DIWRGDRGVV

SEQ ID NO: 128646 - protein, 10 aa, synthetic construct
DIFRGDRGVV

SEQ ID NO: 128647 - protein, 10 aa, synthetic construct
DIKRGDRGVV

SEQ ID NO: 128648 - protein, 10 aa, synthetic construct
DIRRGDRGVV

SEQ ID NO: 128649 - protein, 10 aa, synthetic construct
DIHRGDRGVV

SEQ ID NO: 128650 - protein, 10 aa, synthetic construct
DISRGDRGVV

SEQ ID NO: 128651 - protein, 10 aa, synthetic construct
DITRGDRGVV

SEQ ID NO: 128652 - protein, 10 aa, synthetic construct
DIYRGDRGVV

SEQ ID NO: 128653 - protein, 10 aa, synthetic construct
DINRGDRGVV

SEQ ID NO: 128654 - protein, 10 aa, synthetic construct
DIQRGDRGVV

SEQ ID NO: 128655 - protein, 10 aa, synthetic construct
DIDRGDRGVV

SEQ ID NO: 128656 - protein, 10 aa, synthetic construct
DIERGDRGVV

SEQ ID NO: 128657 - protein, 10 aa, synthetic construct
DMGRGDRGVV

SEQ ID NO: 128658 - protein, 10 aa, synthetic construct
DMARGDRGVV

SEQ ID NO: 128659 - protein, 10 aa, synthetic construct
DMVRGDRGVV

SEQ ID NO: 128660 - protein, 10 aa, synthetic construct
DMPRGDRGVV

SEQ ID NO: 128661 - protein, 10 aa, synthetic construct
DMLRGDRGVV

SEQ ID NO: 128662 - protein, 10 aa, synthetic construct
DMIRGDRGVV

SEQ ID NO: 128663 - protein, 10 aa, synthetic construct
DMMRGDRGVV

SEQ ID NO: 128664 - protein, 10 aa, synthetic construct
DMWRGDRGVV

SEQ ID NO: 128665 - protein, 10 aa, synthetic construct
DMFRGDRGVV

SEQ ID NO: 128666 - protein, 10 aa, synthetic construct
DMKRGDRGVV

SEQ ID NO: 128667 - protein, 10 aa, synthetic construct
DMRRGDRGVV

SEQ ID NO: 128668 - protein, 10 aa, synthetic construct
DMHRGDRGVV

SEQ ID NO: 128669 - protein, 10 aa, synthetic construct
DMSRGDRGVV

SEQ ID NO: 128670 - protein, 10 aa, synthetic construct
DMTRGDRGVV

SEQ ID NO: 128671 - protein, 10 aa, synthetic construct
DMYRGDRGVV

SEQ ID NO: 128672 - protein, 10 aa, synthetic construct
DMNRGDRGVV

SEQ ID NO: 128673 - protein, 10 aa, synthetic construct
DMQRGDRGVV

SEQ ID NO: 128674 - protein, 10 aa, synthetic construct
DMDRGDRGVV

SEQ ID NO: 128675 - protein, 10 aa, synthetic construct
DMERGDRGVV

SEQ ID NO: 128676 - protein, 10 aa, synthetic construct
DWGRGDRGVV

SEQ ID NO: 128677 - protein, 10 aa, synthetic construct
DWARGDRGVV

SEQ ID NO: 128678 - protein, 10 aa, synthetic construct
DWVRGDRGVV

SEQ ID NO: 128679 - protein, 10 aa, synthetic construct
DWPRGDRGVV

SEQ ID NO: 128680 - protein, 10 aa, synthetic construct
DWLRGDRGVV

SEQ ID NO: 128681 - protein, 10 aa, synthetic construct
DWIRGDRGVV

SEQ ID NO: 128682 - protein, 10 aa, synthetic construct
DWMRGDRGVV

SEQ ID NO: 128683 - protein, 10 aa, synthetic construct
DWWRGDRGVV

SEQ ID NO: 128684 - protein, 10 aa, synthetic construct
DWFRGDRGVV

SEQ ID NO: 128685 - protein, 10 aa, synthetic construct
DWKRGDRGVV

SEQ ID NO: 128686 - protein, 10 aa, synthetic construct
DWRRGDRGVV

SEQ ID NO: 128687 - protein, 10 aa, synthetic construct
DWHRGDRGVV

SEQ ID NO: 128688 - protein, 10 aa, synthetic construct
DWSRGDRGVV

SEQ ID NO: 128689 - protein, 10 aa, synthetic construct
DWTRGDRGVV

SEQ ID NO: 128690 - protein, 10 aa, synthetic construct
DWYRGDRGVV

SEQ ID NO: 128691 - protein, 10 aa, synthetic construct
DWNRGDRGVV

SEQ ID NO: 128692 - protein, 10 aa, synthetic construct
DWQRGDRGVV

SEQ ID NO: 128693 - protein, 10 aa, synthetic construct
DWDRGDRGVV

SEQ ID NO: 128694 - protein, 10 aa, synthetic construct
DWERGDRGVV

SEQ ID NO: 128695 - protein, 10 aa, synthetic construct
DFGRGDRGVV

SEQ ID NO: 128696 - protein, 10 aa, synthetic construct
DFARGDRGVV

SEQ ID NO: 128697 - protein, 10 aa, synthetic construct
DFVRGDRGVV

SEQ ID NO: 128698 - protein, 10 aa, synthetic construct
DFPRGDRGVV

SEQ ID NO: 128699 - protein, 10 aa, synthetic construct
DFLRGDRGVV

SEQ ID NO: 128700 - protein, 10 aa, synthetic construct
DFIRGDRGVV

SEQ ID NO: 128701 - protein, 10 aa, synthetic construct
DFMRGDRGVV

SEQ ID NO: 128702 - protein, 10 aa, synthetic construct
DFWRGDRGVV

SEQ ID NO: 128703 - protein, 10 aa, synthetic construct
DFFRGDRGVV

SEQ ID NO: 128704 - protein, 10 aa, synthetic construct
DFKRGDRGVV

SEQ ID NO: 128705 - protein, 10 aa, synthetic construct
DFRRGDRGVV

SEQ ID NO: 128706 - protein, 10 aa, synthetic construct
DFHRGDRGVV

SEQ ID NO: 128707 - protein, 10 aa, synthetic construct
DFSRGDRGVV

SEQ ID NO: 128708 - protein, 10 aa, synthetic construct
DFTRGDRGVV

SEQ ID NO: 128709 - protein, 10 aa, synthetic construct
DFYRGDRGVV

SEQ ID NO: 128710 - protein, 10 aa, synthetic construct
DFNRGDRGVV

SEQ ID NO: 128711 - protein, 10 aa, synthetic construct
DFQRGDRGVV

SEQ ID NO: 128712 - protein, 10 aa, synthetic construct
DFDRGDRGVV

SEQ ID NO: 128713 - protein, 10 aa, synthetic construct
DFERGDRGVV

SEQ ID NO: 128714 - protein, 10 aa, synthetic construct
DKGRGDRGVV

SEQ ID NO: 128715 - protein, 10 aa, synthetic construct
DKARGDRGVV

SEQ ID NO: 128716 - protein, 10 aa, synthetic construct
DKVRGDRGVV

SEQ ID NO: 128717 - protein, 10 aa, synthetic construct
DKPRGDRGVV

SEQ ID NO: 128718 - protein, 10 aa, synthetic construct
DKLRGDRGVV

SEQ ID NO: 128719 - protein, 10 aa, synthetic construct
DKIRGDRGVV

SEQ ID NO: 128720 - protein, 10 aa, synthetic construct
DKMRGDRGVV

SEQ ID NO: 128721 - protein, 10 aa, synthetic construct
DKWRGDRGVV

SEQ ID NO: 128722 - protein, 10 aa, synthetic construct
DKFRGDRGVV

SEQ ID NO: 128723 - protein, 10 aa, synthetic construct
DKKRGDRGVV

SEQ ID NO: 128724 - protein, 10 aa, synthetic construct
DKRRGDRGVV

SEQ ID NO: 128725 - protein, 10 aa, synthetic construct
DKHRGDRGVV

SEQ ID NO: 128726 - protein, 10 aa, synthetic construct
DKSRGDRGVV

SEQ ID NO: 128727 - protein, 10 aa, synthetic construct
DKTRGDRGVV

SEQ ID NO: 128728 - protein, 10 aa, synthetic construct
DKYRGDRGVV

SEQ ID NO: 128729 - protein, 10 aa, synthetic construct
DKNRGDRGVV

SEQ ID NO: 128730 - protein, 10 aa, synthetic construct
DKQRGDRGVV

SEQ ID NO: 128731 - protein, 10 aa, synthetic construct
DKDRGDRGVV

SEQ ID NO: 128732 - protein, 10 aa, synthetic construct
DKERGDRGVV

SEQ ID NO: 128733 - protein, 10 aa, synthetic construct
DRGRGDRGVV

SEQ ID NO: 128734 - protein, 10 aa, synthetic construct
DRARGDRGVV

SEQ ID NO: 128735 - protein, 10 aa, synthetic construct
DRVRGDRGVV

SEQ ID NO: 128736 - protein, 10 aa, synthetic construct
DRPRGDRGVV

SEQ ID NO: 128737 - protein, 10 aa, synthetic construct
DRLRGDRGVV

SEQ ID NO: 128738 - protein, 10 aa, synthetic construct
DRIRGDRGVV

SEQ ID NO: 128739 - protein, 10 aa, synthetic construct
DRMRGDRGVV

SEQ ID NO: 128740 - protein, 10 aa, synthetic construct
DRWRGDRGVV

SEQ ID NO: 128741 - protein, 10 aa, synthetic construct
DRFRGDRGVV

SEQ ID NO: 128742 - protein, 10 aa, synthetic construct
DRKRGDRGVV

SEQ ID NO: 128743 - protein, 10 aa, synthetic construct
DRRRGDRGVV

SEQ ID NO: 128744 - protein, 10 aa, synthetic construct
DRHRGDRGVV

SEQ ID NO: 128745 - protein, 10 aa, synthetic construct
DRSRGDRGVV

SEQ ID NO: 128746 - protein, 10 aa, synthetic construct
DRTRGDRGVV

SEQ ID NO: 128747 - protein, 10 aa, synthetic construct
DRYRGDRGVV

SEQ ID NO: 128748 - protein, 10 aa, synthetic construct
DRNRGDRGVV

SEQ ID NO: 128749 - protein, 10 aa, synthetic construct
DRQRGDRGVV

SEQ ID NO: 128750 - protein, 10 aa, synthetic construct
DRDRGDRGVV

SEQ ID NO: 128751 - protein, 10 aa, synthetic construct
DRERGDRGVV

SEQ ID NO: 128752 - protein, 10 aa, synthetic construct
DHGRGDRGVV

SEQ ID NO: 128753 - protein, 10 aa, synthetic construct
DHARGDRGVV

SEQ ID NO: 128754 - protein, 10 aa, synthetic construct
DHVRGDRGVV

SEQ ID NO: 128755 - protein, 10 aa, synthetic construct
DHPRGDRGVV

SEQ ID NO: 128756 - protein, 10 aa, synthetic construct
DHLRGDRGVV

SEQ ID NO: 128757 - protein, 10 aa, synthetic construct
DHIRGDRGVV

SEQ ID NO: 128758 - protein, 10 aa, synthetic construct
DHMRGDRGVV

SEQ ID NO: 128759 - protein, 10 aa, synthetic construct
DHWRGDRGVV

SEQ ID NO: 128760 - protein, 10 aa, synthetic construct
DHFRGDRGVV

SEQ ID NO: 128761 - protein, 10 aa, synthetic construct
DHKRGDRGVV

SEQ ID NO: 128762 - protein, 10 aa, synthetic construct
DHRRGDRGVV

SEQ ID NO: 128763 - protein, 10 aa, synthetic construct
DHHRGDRGVV

SEQ ID NO: 128764 - protein, 10 aa, synthetic construct
DHSRGDRGVV

SEQ ID NO: 128765 - protein, 10 aa, synthetic construct
DHTRGDRGVV

SEQ ID NO: 128766 - protein, 10 aa, synthetic construct
DHYRGDRGVV

SEQ ID NO: 128767 - protein, 10 aa, synthetic construct
DHNRGDRGVV

SEQ ID NO: 128768 - protein, 10 aa, synthetic construct
DHQRGDRGVV

SEQ ID NO: 128769 - protein, 10 aa, synthetic construct
DHDRGDRGVV

SEQ ID NO: 128770 - protein, 10 aa, synthetic construct
DHERGDRGVV

SEQ ID NO: 128771 - protein, 10 aa, synthetic construct
DSGRGDRGVV

SEQ ID NO: 128772 - protein, 10 aa, synthetic construct
DSARGDRGVV

SEQ ID NO: 128773 - protein, 10 aa, synthetic construct
DSVRGDRGVV

SEQ ID NO: 128774 - protein, 10 aa, synthetic construct
DSPRGDRGVV

SEQ ID NO: 128775 - protein, 10 aa, synthetic construct
DSLRGDRGVV

SEQ ID NO: 128776 - protein, 10 aa, synthetic construct
DSIRGDRGVV

SEQ ID NO: 128777 - protein, 10 aa, synthetic construct
DSMRGDRGVV

SEQ ID NO: 128778 - protein, 10 aa, synthetic construct
DSWRGDRGVV

SEQ ID NO: 128779 - protein, 10 aa, synthetic construct
DSFRGDRGVV

SEQ ID NO: 128780 - protein, 10 aa, synthetic construct
DSKRGDRGVV

SEQ ID NO: 128781 - protein, 10 aa, synthetic construct
DSRRGDRGVV

SEQ ID NO: 128782 - protein, 10 aa, synthetic construct
DSHRGDRGVV

SEQ ID NO: 128783 - protein, 10 aa, synthetic construct
DSSRGDRGVV

SEQ ID NO: 128784 - protein, 10 aa, synthetic construct
DSTRGDRGVV

SEQ ID NO: 128785 - protein, 10 aa, synthetic construct
DSYRGDRGVV

SEQ ID NO: 128786 - protein, 10 aa, synthetic construct
DSNRGDRGVV

SEQ ID NO: 128787 - protein, 10 aa, synthetic construct
DSQRGDRGVV

SEQ ID NO: 128788 - protein, 10 aa, synthetic construct
DSDRGDRGVV

SEQ ID NO: 128789 - protein, 10 aa, synthetic construct
DSERGDRGVV

SEQ ID NO: 128790 - protein, 10 aa, synthetic construct
DTGRGDRGVV

SEQ ID NO: 128791 - protein, 10 aa, synthetic construct
DTARGDRGVV

SEQ ID NO: 128792 - protein, 10 aa, synthetic construct
DTVRGDRGVV

SEQ ID NO: 128793 - protein, 10 aa, synthetic construct
DTPRGDRGVV

SEQ ID NO: 128794 - protein, 10 aa, synthetic construct
DTLRGDRGVV

SEQ ID NO: 128795 - protein, 10 aa, synthetic construct
DTIRGDRGVV

SEQ ID NO: 128796 - protein, 10 aa, synthetic construct
DTMRGDRGVV

SEQ ID NO: 128797 - protein, 10 aa, synthetic construct
DTWRGDRGVV

SEQ ID NO: 128798 - protein, 10 aa, synthetic construct
DTFRGDRGVV

SEQ ID NO: 128799 - protein, 10 aa, synthetic construct
DTKRGDRGVV

SEQ ID NO: 128800 - protein, 10 aa, synthetic construct
DTRRGDRGVV

SEQ ID NO: 128801 - protein, 10 aa, synthetic construct
DTHRGDRGVV

SEQ ID NO: 128802 - protein, 10 aa, synthetic construct
DTSRGDRGVV

SEQ ID NO: 128803 - protein, 10 aa, synthetic construct
DTTRGDRGVV

SEQ ID NO: 128804 - protein, 10 aa, synthetic construct
DTYRGDRGVV

SEQ ID NO: 128805 - protein, 10 aa, synthetic construct
DTNRGDRGVV

SEQ ID NO: 128806 - protein, 10 aa, synthetic construct
DTQRGDRGVV

SEQ ID NO: 128807 - protein, 10 aa, synthetic construct
DTDRGDRGVV

SEQ ID NO: 128808 - protein, 10 aa, synthetic construct
DTERGDRGVV

SEQ ID NO: 128809 - protein, 10 aa, synthetic construct
DYGRGDRGVV

SEQ ID NO: 128810 - protein, 10 aa, synthetic construct
DYARGDRGVV

SEQ ID NO: 128811 - protein, 10 aa, synthetic construct
DYVRGDRGVV

SEQ ID NO: 128812 - protein, 10 aa, synthetic construct
DYPRGDRGVV

SEQ ID NO: 128813 - protein, 10 aa, synthetic construct
DYLRGDRGVV

SEQ ID NO: 128814 - protein, 10 aa, synthetic construct
DYIRGDRGVV

SEQ ID NO: 128815 - protein, 10 aa, synthetic construct
DYMRGDRGVV

SEQ ID NO: 128816 - protein, 10 aa, synthetic construct
DYWRGDRGVV

SEQ ID NO: 128817 - protein, 10 aa, synthetic construct
DYFRGDRGVV

SEQ ID NO: 128818 - protein, 10 aa, synthetic construct
DYKRGDRGVV

SEQ ID NO: 128819 - protein, 10 aa, synthetic construct
DYRRGDRGVV

SEQ ID NO: 128820 - protein, 10 aa, synthetic construct
DYHRGDRGVV

SEQ ID NO: 128821 - protein, 10 aa, synthetic construct
DYSRGDRGVV

SEQ ID NO: 128822 - protein, 10 aa, synthetic construct
DYTRGDRGVV

SEQ ID NO: 128823 - protein, 10 aa, synthetic construct
DYYRGDRGVV

SEQ ID NO: 128824 - protein, 10 aa, synthetic construct
DYNRGDRGVV

SEQ ID NO: 128825 - protein, 10 aa, synthetic construct
DYQRGDRGVV

SEQ ID NO: 128826 - protein, 10 aa, synthetic construct
DYDRGDRGVV

SEQ ID NO: 128827 - protein, 10 aa, synthetic construct
DYERGDRGVV

SEQ ID NO: 128828 - protein, 10 aa, synthetic construct
DNGRGDRGVV

SEQ ID NO: 128829 - protein, 10 aa, synthetic construct
DNARGDRGVV

SEQ ID NO: 128830 - protein, 10 aa, synthetic construct
DNVRGDRGVV

SEQ ID NO: 128831 - protein, 10 aa, synthetic construct
DNPRGDRGVV

SEQ ID NO: 128832 - protein, 10 aa, synthetic construct
DNLRGDRGVV

SEQ ID NO: 128833 - protein, 10 aa, synthetic construct
DNIRGDRGVV

SEQ ID NO: 128834 - protein, 10 aa, synthetic construct
DNMRGDRGVV

SEQ ID NO: 128835 - protein, 10 aa, synthetic construct
DNWRGDRGVV

SEQ ID NO: 128836 - protein, 10 aa, synthetic construct
DNFRGDRGVV

SEQ ID NO: 128837 - protein, 10 aa, synthetic construct
DNKRGDRGVV

SEQ ID NO: 128838 - protein, 10 aa, synthetic construct
DNRRGDRGVV

SEQ ID NO: 128839 - protein, 10 aa, synthetic construct
DNHRGDRGVV

SEQ ID NO: 128840 - protein, 10 aa, synthetic construct
DNSRGDRGVV

SEQ ID NO: 128841 - protein, 10 aa, synthetic construct
DNTRGDRGVV

SEQ ID NO: 128842 - protein, 10 aa, synthetic construct
DNYRGDRGVV

SEQ ID NO: 128843 - protein, 10 aa, synthetic construct
DNNRGDRGVV

SEQ ID NO: 128844 - protein, 10 aa, synthetic construct
DNQRGDRGVV

SEQ ID NO: 128845 - protein, 10 aa, synthetic construct
DNDRGDRGVV

SEQ ID NO: 128846 - protein, 10 aa, synthetic construct
DNERGDRGVV

SEQ ID NO: 128847 - protein, 10 aa, synthetic construct
DQGRGDRGVV

SEQ ID NO: 128848 - protein, 10 aa, synthetic construct
DQARGDRGVV

SEQ ID NO: 128849 - protein, 10 aa, synthetic construct
DQVRGDRGVV

SEQ ID NO: 128850 - protein, 10 aa, synthetic construct
DQPRGDRGVV

SEQ ID NO: 128851 - protein, 10 aa, synthetic construct
DQLRGDRGVV

SEQ ID NO: 128852 - protein, 10 aa, synthetic construct
DQIRGDRGVV

SEQ ID NO: 128853 - protein, 10 aa, synthetic construct
DQMRGDRGVV

SEQ ID NO: 128854 - protein, 10 aa, synthetic construct
DQWRGDRGVV

SEQ ID NO: 128855 - protein, 10 aa, synthetic construct
DQFRGDRGVV

SEQ ID NO: 128856 - protein, 10 aa, synthetic construct
DQKRGDRGVV

SEQ ID NO: 128857 - protein, 10 aa, synthetic construct
DQRRGDRGVV

SEQ ID NO: 128858 - protein, 10 aa, synthetic construct
DQHRGDRGVV

SEQ ID NO: 128859 - protein, 10 aa, synthetic construct
DQSRGDRGVV

SEQ ID NO: 128860 - protein, 10 aa, synthetic construct
DQTRGDRGVV

SEQ ID NO: 128861 - protein, 10 aa, synthetic construct
DQYRGDRGVV

SEQ ID NO: 128862 - protein, 10 aa, synthetic construct
DQNRGDRGVV

SEQ ID NO: 128863 - protein, 10 aa, synthetic construct
DQQRGDRGVV

SEQ ID NO: 128864 - protein, 10 aa, synthetic construct
DQDRGDRGVV

SEQ ID NO: 128865 - protein, 10 aa, synthetic construct
DQERGDRGVV

SEQ ID NO: 128866 - protein, 10 aa, synthetic construct
DDGRGDRGVV

SEQ ID NO: 128867 - protein, 10 aa, synthetic construct
DDARGDRGVV

SEQ ID NO: 128868 - protein, 10 aa, synthetic construct
DDVRGDRGVV

SEQ ID NO: 128869 - protein, 10 aa, synthetic construct
DDPRGDRGVV

SEQ ID NO: 128870 - protein, 10 aa, synthetic construct
DDLRGDRGVV

SEQ ID NO: 128871 - protein, 10 aa, synthetic construct
DDIRGDRGVV

SEQ ID NO: 128872 - protein, 10 aa, synthetic construct
DDMRGDRGVV

SEQ ID NO: 128873 - protein, 10 aa, synthetic construct
DDWRGDRGVV

SEQ ID NO: 128874 - protein, 10 aa, synthetic construct
DDFRGDRGVV

SEQ ID NO: 128875 - protein, 10 aa, synthetic construct
DDKRGDRGVV

SEQ ID NO: 128876 - protein, 10 aa, synthetic construct
DDRRGDRGVV

SEQ ID NO: 128877 - protein, 10 aa, synthetic construct
DDHRGDRGVV

SEQ ID NO: 128878 - protein, 10 aa, synthetic construct
DDSRGDRGVV

SEQ ID NO: 128879 - protein, 10 aa, synthetic construct
DDTRGDRGVV

SEQ ID NO: 128880 - protein, 10 aa, synthetic construct
DDYRGDRGVV

SEQ ID NO: 128881 - protein, 10 aa, synthetic construct
DDNRGDRGVV

SEQ ID NO: 128882 - protein, 10 aa, synthetic construct
DDQRGDRGVV

SEQ ID NO: 128883 - protein, 10 aa, synthetic construct
DDDRGDRGVV

SEQ ID NO: 128884 - protein, 10 aa, synthetic construct
DDERGDRGVV

SEQ ID NO: 128885 - protein, 10 aa, synthetic construct
DEGRGDRGVV

SEQ ID NO: 128886 - protein, 10 aa, synthetic construct
DEARGDRGVV

SEQ ID NO: 128887 - protein, 10 aa, synthetic construct
DEVRGDRGVV

SEQ ID NO: 128888 - protein, 10 aa, synthetic construct
DEPRGDRGVV

SEQ ID NO: 128889 - protein, 10 aa, synthetic construct
DELRGDRGVV

SEQ ID NO: 128890 - protein, 10 aa, synthetic construct
DEIRGDRGVV

SEQ ID NO: 128891 - protein, 10 aa, synthetic construct
DEMRGDRGVV

SEQ ID NO: 128892 - protein, 10 aa, synthetic construct
DEWRGDRGVV

SEQ ID NO: 128893 - protein, 10 aa, synthetic construct
DEFRGDRGVV

SEQ ID NO: 128894 - protein, 10 aa, synthetic construct
DEKRGDRGVV

SEQ ID NO: 128895 - protein, 10 aa, synthetic construct
DERRGDRGVV

SEQ ID NO: 128896 - protein, 10 aa, synthetic construct
DEHRGDRGVV

SEQ ID NO: 128897 - protein, 10 aa, synthetic construct
DESRGDRGVV

SEQ ID NO: 128898 - protein, 10 aa, synthetic construct
DETRGDRGVV

SEQ ID NO: 128899 - protein, 10 aa, synthetic construct
DEYRGDRGVV

SEQ ID NO: 128900 - protein, 10 aa, synthetic construct
DENRGDRGVV

SEQ ID NO: 128901 - protein, 10 aa, synthetic construct
DEQRGDRGVV

SEQ ID NO: 128902 - protein, 10 aa, synthetic construct
DEDRGDRGVV

SEQ ID NO: 128903 - protein, 10 aa, synthetic construct
DEERGDRGVV

SEQ ID NO: 128904 - protein, 10 aa, synthetic construct
QGGRGDRGVV

SEQ ID NO: 128905 - protein, 10 aa, synthetic construct
QGARGDRGVV

SEQ ID NO: 128906 - protein, 10 aa, synthetic construct
QGVRGDRGVV

SEQ ID NO: 128907 - protein, 10 aa, synthetic construct
QGPRGDRGVV

SEQ ID NO: 128908 - protein, 10 aa, synthetic construct
QGLRGDRGVV

SEQ ID NO: 128909 - protein, 10 aa, synthetic construct
QGIRGDRGVV

SEQ ID NO: 128910 - protein, 10 aa, synthetic construct
QGMRGDRGVV

SEQ ID NO: 128911 - protein, 10 aa, synthetic construct
QGWRGDRGVV

SEQ ID NO: 128912 - protein, 10 aa, synthetic construct
QGFRGDRGVV

SEQ ID NO: 128913 - protein, 10 aa, synthetic construct
QGKRGDRGVV

SEQ ID NO: 128914 - protein, 10 aa, synthetic construct
QGRRGDRGVV

SEQ ID NO: 128915 - protein, 10 aa, synthetic construct
QGHRGDRGVV

SEQ ID NO: 128916 - protein, 10 aa, synthetic construct
QGSRGDRGVV

SEQ ID NO: 128917 - protein, 10 aa, synthetic construct
QGTRGDRGVV

SEQ ID NO: 128918 - protein, 10 aa, synthetic construct
QGYRGDRGVV

SEQ ID NO: 128919 - protein, 10 aa, synthetic construct
QGNRGDRGVV

SEQ ID NO: 128920 - protein, 10 aa, synthetic construct
QGQRGDRGVV

SEQ ID NO: 128921 - protein, 10 aa, synthetic construct
QGDRGDRGVV

SEQ ID NO: 128922 - protein, 10 aa, synthetic construct
QGERGDRGVV

SEQ ID NO: 128923 - protein, 10 aa, synthetic construct
QAGRGDRGVV

SEQ ID NO: 128924 - protein, 10 aa, synthetic construct
QAARGDRGVV

SEQ ID NO: 128925 - protein, 10 aa, synthetic construct
QAVRGDRGVV

SEQ ID NO: 128926 - protein, 10 aa, synthetic construct
QAPRGDRGVV

SEQ ID NO: 128927 - protein, 10 aa, synthetic construct
QALRGDRGVV

SEQ ID NO: 128928 - protein, 10 aa, synthetic construct
QAIRGDRGVV

SEQ ID NO: 128929 - protein, 10 aa, synthetic construct
QAMRGDRGVV

SEQ ID NO: 128930 - protein, 10 aa, synthetic construct
QAWRGDRGVV

SEQ ID NO: 128931 - protein, 10 aa, synthetic construct
QAFRGDRGVV

SEQ ID NO: 128932 - protein, 10 aa, synthetic construct
QAKRGDRGVV

SEQ ID NO: 128933 - protein, 10 aa, synthetic construct
QARRGDRGVV

SEQ ID NO: 128934 - protein, 10 aa, synthetic construct
QAHRGDRGVV

SEQ ID NO: 128935 - protein, 10 aa, synthetic construct
QASRGDRGVV

SEQ ID NO: 128936 - protein, 10 aa, synthetic construct
QATRGDRGVV

SEQ ID NO: 128937 - protein, 10 aa, synthetic construct
QAYRGDRGVV

SEQ ID NO: 128938 - protein, 10 aa, synthetic construct
QANRGDRGVV

SEQ ID NO: 128939 - protein, 10 aa, synthetic construct
QAQRGDRGVV

SEQ ID NO: 128940 - protein, 10 aa, synthetic construct
QADRGDRGVV

SEQ ID NO: 128941 - protein, 10 aa, synthetic construct
QAERGDRGVV

SEQ ID NO: 128942 - protein, 10 aa, synthetic construct
QVGRGDRGVV

SEQ ID NO: 128943 - protein, 10 aa, synthetic construct
QVARGDRGVV

SEQ ID NO: 128944 - protein, 10 aa, synthetic construct
QVVRGDRGVV

SEQ ID NO: 128945 - protein, 10 aa, synthetic construct
QVPRGDRGVV

SEQ ID NO: 128946 - protein, 10 aa, synthetic construct
QVLRGDRGVV

SEQ ID NO: 128947 - protein, 10 aa, synthetic construct
QVIRGDRGVV

SEQ ID NO: 128948 - protein, 10 aa, synthetic construct
QVMRGDRGVV

SEQ ID NO: 128949 - protein, 10 aa, synthetic construct
QVWRGDRGVV

SEQ ID NO: 128950 - protein, 10 aa, synthetic construct
QVFRGDRGVV

SEQ ID NO: 128951 - protein, 10 aa, synthetic construct
QVKRGDRGVV

SEQ ID NO: 128952 - protein, 10 aa, synthetic construct
QVRRGDRGVV

SEQ ID NO: 128953 - protein, 10 aa, synthetic construct
QVHRGDRGVV

SEQ ID NO: 128954 - protein, 10 aa, synthetic construct
QVSRGDRGVV

SEQ ID NO: 128955 - protein, 10 aa, synthetic construct
QVTRGDRGVV

SEQ ID NO: 128956 - protein, 10 aa, synthetic construct
QVYRGDRGVV

SEQ ID NO: 128957 - protein, 10 aa, synthetic construct
QVNRGDRGVV

SEQ ID NO: 128958 - protein, 10 aa, synthetic construct
QVQRGDRGVV

SEQ ID NO: 128959 - protein, 10 aa, synthetic construct
QVDRGDRGVV

SEQ ID NO: 128960 - protein, 10 aa, synthetic construct
QVERGDRGVV

SEQ ID NO: 128961 - protein, 10 aa, synthetic construct
QPGRGDRGVV

SEQ ID NO: 128962 - protein, 10 aa, synthetic construct
QPARGDRGVV

SEQ ID NO: 128963 - protein, 10 aa, synthetic construct
QPVRGDRGVV

SEQ ID NO: 128964 - protein, 10 aa, synthetic construct
QPPRGDRGVV

SEQ ID NO: 128965 - protein, 10 aa, synthetic construct
QPLRGDRGVV

SEQ ID NO: 128966 - protein, 10 aa, synthetic construct
QPIRGDRGVV

SEQ ID NO: 128967 - protein, 10 aa, synthetic construct
QPMRGDRGVV

SEQ ID NO: 128968 - protein, 10 aa, synthetic construct
QPWRGDRGVV

SEQ ID NO: 128969 - protein, 10 aa, synthetic construct
QPFRGDRGVV

SEQ ID NO: 128970 - protein, 10 aa, synthetic construct
QPKRGDRGVV

SEQ ID NO: 128971 - protein, 10 aa, synthetic construct
QPRRGDRGVV

SEQ ID NO: 128972 - protein, 10 aa, synthetic construct
QPHRGDRGVV

SEQ ID NO: 128973 - protein, 10 aa, synthetic construct
QPSRGDRGVV

SEQ ID NO: 128974 - protein, 10 aa, synthetic construct
QPTRGDRGVV

SEQ ID NO: 128975 - protein, 10 aa, synthetic construct
QPYRGDRGVV

SEQ ID NO: 128976 - protein, 10 aa, synthetic construct
QPNRGDRGVV

SEQ ID NO: 128977 - protein, 10 aa, synthetic construct
QPQRGDRGVV

SEQ ID NO: 128978 - protein, 10 aa, synthetic construct
QPDRGDRGVV

SEQ ID NO: 128979 - protein, 10 aa, synthetic construct
QPERGDRGVV

SEQ ID NO: 128980 - protein, 10 aa, synthetic construct
QLGRGDRGVV

SEQ ID NO: 128981 - protein, 10 aa, synthetic construct
QLARGDRGVV

SEQ ID NO: 128982 - protein, 10 aa, synthetic construct
QLVRGDRGVV

SEQ ID NO: 128983 - protein, 10 aa, synthetic construct
QLPRGDRGVV

SEQ ID NO: 128984 - protein, 10 aa, synthetic construct
QLLRGDRGVV

SEQ ID NO: 128985 - protein, 10 aa, synthetic construct
QLIRGDRGVV

SEQ ID NO: 128986 - protein, 10 aa, synthetic construct
QLMRGDRGVV

SEQ ID NO: 128987 - protein, 10 aa, synthetic construct
QLWRGDRGVV

SEQ ID NO: 128988 - protein, 10 aa, synthetic construct
QLFRGDRGVV

SEQ ID NO: 128989 - protein, 10 aa, synthetic construct
QLKRGDRGVV

SEQ ID NO: 128990 - protein, 10 aa, synthetic construct
QLRRGDRGVV

SEQ ID NO: 128991 - protein, 10 aa, synthetic construct
QLHRGDRGVV

SEQ ID NO: 128992 - protein, 10 aa, synthetic construct
QLSRGDRGVV

SEQ ID NO: 128993 - protein, 10 aa, synthetic construct
QLTRGDRGVV

SEQ ID NO: 128994 - protein, 10 aa, synthetic construct
QLYRGDRGVV

SEQ ID NO: 128995 - protein, 10 aa, synthetic construct
QLNRGDRGVV

SEQ ID NO: 128996 - protein, 10 aa, synthetic construct
QLQRGDRGVV

SEQ ID NO: 128997 - protein, 10 aa, synthetic construct
QLDRGDRGVV

SEQ ID NO: 128998 - protein, 10 aa, synthetic construct
QLERGDRGVV

SEQ ID NO: 128999 - protein, 10 aa, synthetic construct
QIGRGDRGVV

SEQ ID NO: 129000 - protein, 10 aa, synthetic construct
QIARGDRGVV

SEQ ID NO: 129001 - protein, 10 aa, synthetic construct
QIVRGDRGVV

SEQ ID NO: 129002 - protein, 10 aa, synthetic construct
QIPRGDRGVV

SEQ ID NO: 129003 - protein, 10 aa, synthetic construct
QILRGDRGVV

SEQ ID NO: 129004 - protein, 10 aa, synthetic construct
QIIRGDRGVV

SEQ ID NO: 129005 - protein, 10 aa, synthetic construct
QIMRGDRGVV

SEQ ID NO: 129006 - protein, 10 aa, synthetic construct
QIWRGDRGVV

SEQ ID NO: 129007 - protein, 10 aa, synthetic construct
QIFRGDRGVV

SEQ ID NO: 129008 - protein, 10 aa, synthetic construct
QIKRGDRGVV

SEQ ID NO: 129009 - protein, 10 aa, synthetic construct
QIRRGDRGVV

SEQ ID NO: 129010 - protein, 10 aa, synthetic construct
QIHRGDRGVV

SEQ ID NO: 129011 - protein, 10 aa, synthetic construct
QISRGDRGVV

SEQ ID NO: 129012 - protein, 10 aa, synthetic construct
QITRGDRGVV

SEQ ID NO: 129013 - protein, 10 aa, synthetic construct
QIYRGDRGVV

SEQ ID NO: 129014 - protein, 10 aa, synthetic construct
QINRGDRGVV

SEQ ID NO: 129015 - protein, 10 aa, synthetic construct
QIQRGDRGVV

SEQ ID NO: 129016 - protein, 10 aa, synthetic construct
QIDRGDRGVV

SEQ ID NO: 129017 - protein, 10 aa, synthetic construct
QIERGDRGVV

SEQ ID NO: 129018 - protein, 10 aa, synthetic construct
QMGRGDRGVV

SEQ ID NO: 129019 - protein, 10 aa, synthetic construct
QMARGDRGVV

SEQ ID NO: 129020 - protein, 10 aa, synthetic construct
QMVRGDRGVV

SEQ ID NO: 129021 - protein, 10 aa, synthetic construct
QMPRGDRGVV

SEQ ID NO: 129022 - protein, 10 aa, synthetic construct
QMLRGDRGVV

SEQ ID NO: 129023 - protein, 10 aa, synthetic construct
QMIRGDRGVV

SEQ ID NO: 129024 - protein, 10 aa, synthetic construct
QMMRGDRGVV

SEQ ID NO: 129025 - protein, 10 aa, synthetic construct
QMWRGDRGVV

SEQ ID NO: 129026 - protein, 10 aa, synthetic construct
QMFRGDRGVV

SEQ ID NO: 129027 - protein, 10 aa, synthetic construct
QMKRGDRGVV

SEQ ID NO: 129028 - protein, 10 aa, synthetic construct
QMRRGDRGVV

SEQ ID NO: 129029 - protein, 10 aa, synthetic construct
QMHRGDRGVV

SEQ ID NO: 129030 - protein, 10 aa, synthetic construct
QMSRGDRGVV

SEQ ID NO: 129031 - protein, 10 aa, synthetic construct
QMTRGDRGVV

SEQ ID NO: 129032 - protein, 10 aa, synthetic construct
QMYRGDRGVV

SEQ ID NO: 129033 - protein, 10 aa, synthetic construct
QMNRGDRGVV

SEQ ID NO: 129034 - protein, 10 aa, synthetic construct
QMQRGDRGVV

SEQ ID NO: 129035 - protein, 10 aa, synthetic construct
QMDRGDRGVV

SEQ ID NO: 129036 - protein, 10 aa, synthetic construct
QMERGDRGVV

SEQ ID NO: 129037 - protein, 10 aa, synthetic construct
QWGRGDRGVV

SEQ ID NO: 129038 - protein, 10 aa, synthetic construct
QWARGDRGVV

SEQ ID NO: 129039 - protein, 10 aa, synthetic construct
QWVRGDRGVV

SEQ ID NO: 129040 - protein, 10 aa, synthetic construct
QWPRGDRGVV

SEQ ID NO: 129041 - protein, 10 aa, synthetic construct
QWLRGDRGVV

SEQ ID NO: 129042 - protein, 10 aa, synthetic construct
QWIRGDRGVV

SEQ ID NO: 129043 - protein, 10 aa, synthetic construct
QWMRGDRGVV

SEQ ID NO: 129044 - protein, 10 aa, synthetic construct
QWWRGDRGVV

SEQ ID NO: 129045 - protein, 10 aa, synthetic construct
QWFRGDRGVV

SEQ ID NO: 129046 - protein, 10 aa, synthetic construct
QWKRGDRGVV

SEQ ID NO: 129047 - protein, 10 aa, synthetic construct
QWRRGDRGVV

SEQ ID NO: 129048 - protein, 10 aa, synthetic construct
QWHRGDRGVV

SEQ ID NO: 129049 - protein, 10 aa, synthetic construct
QWSRGDRGVV

SEQ ID NO: 129050 - protein, 10 aa, synthetic construct
QWTRGDRGVV

SEQ ID NO: 129051 - protein, 10 aa, synthetic construct
QWYRGDRGVV

SEQ ID NO: 129052 - protein, 10 aa, synthetic construct
QWNRGDRGVV

SEQ ID NO: 129053 - protein, 10 aa, synthetic construct
QWQRGDRGVV

SEQ ID NO: 129054 - protein, 10 aa, synthetic construct
QWDRGDRGVV

SEQ ID NO: 129055 - protein, 10 aa, synthetic construct
QWERGDRGVV

SEQ ID NO: 129056 - protein, 10 aa, synthetic construct
QFGRGDRGVV

SEQ ID NO: 129057 - protein, 10 aa, synthetic construct
QFARGDRGVV

SEQ ID NO: 129058 - protein, 10 aa, synthetic construct
QFVRGDRGVV

SEQ ID NO: 129059 - protein, 10 aa, synthetic construct
QFPRGDRGVV

SEQ ID NO: 129060 - protein, 10 aa, synthetic construct
QFLRGDRGVV

SEQ ID NO: 129061 - protein, 10 aa, synthetic construct
QFIRGDRGVV

SEQ ID NO: 129062 - protein, 10 aa, synthetic construct
QFMRGDRGVV

SEQ ID NO: 129063 - protein, 10 aa, synthetic construct
QFWRGDRGVV

SEQ ID NO: 129064 - protein, 10 aa, synthetic construct
QFFRGDRGVV

SEQ ID NO: 129065 - protein, 10 aa, synthetic construct
QFKRGDRGVV

SEQ ID NO: 129066 - protein, 10 aa, synthetic construct
QFRRGDRGVV

SEQ ID NO: 129067 - protein, 10 aa, synthetic construct
QFHRGDRGVV

SEQ ID NO: 129068 - protein, 10 aa, synthetic construct
QFSRGDRGVV

SEQ ID NO: 129069 - protein, 10 aa, synthetic construct
QFTRGDRGVV

SEQ ID NO: 129070 - protein, 10 aa, synthetic construct
QFYRGDRGVV

SEQ ID NO: 129071 - protein, 10 aa, synthetic construct
QFNRGDRGVV

SEQ ID NO: 129072 - protein, 10 aa, synthetic construct
QFQRGDRGVV

SEQ ID NO: 129073 - protein, 10 aa, synthetic construct
QFDRGDRGVV

SEQ ID NO: 129074 - protein, 10 aa, synthetic construct
QFERGDRGVV

SEQ ID NO: 129075 - protein, 10 aa, synthetic construct
QKGRGDRGVV

SEQ ID NO: 129076 - protein, 10 aa, synthetic construct
QKARGDRGVV

SEQ ID NO: 129077 - protein, 10 aa, synthetic construct
QKVRGDRGVV

SEQ ID NO: 129078 - protein, 10 aa, synthetic construct
QKPRGDRGVV

SEQ ID NO: 129079 - protein, 10 aa, synthetic construct
QKLRGDRGVV

SEQ ID NO: 129080 - protein, 10 aa, synthetic construct
QKIRGDRGVV

SEQ ID NO: 129081 - protein, 10 aa, synthetic construct
QKMRGDRGVV

SEQ ID NO: 129082 - protein, 10 aa, synthetic construct
QKWRGDRGVV

SEQ ID NO: 129083 - protein, 10 aa, synthetic construct
QKFRGDRGVV

SEQ ID NO: 129084 - protein, 10 aa, synthetic construct
QKKRGDRGVV

SEQ ID NO: 129085 - protein, 10 aa, synthetic construct
QKRRGDRGVV

SEQ ID NO: 129086 - protein, 10 aa, synthetic construct
QKHRGDRGVV

SEQ ID NO: 129087 - protein, 10 aa, synthetic construct
QKSRGDRGVV

SEQ ID NO: 129088 - protein, 10 aa, synthetic construct
QKTRGDRGVV

SEQ ID NO: 129089 - protein, 10 aa, synthetic construct
QKYRGDRGVV

SEQ ID NO: 129090 - protein, 10 aa, synthetic construct
QKNRGDRGVV

SEQ ID NO: 129091 - protein, 10 aa, synthetic construct
QKQRGDRGVV

SEQ ID NO: 129092 - protein, 10 aa, synthetic construct
QKDRGDRGVV

SEQ ID NO: 129093 - protein, 10 aa, synthetic construct
QKERGDRGVV

SEQ ID NO: 129094 - protein, 10 aa, synthetic construct
QRGRGDRGVV

SEQ ID NO: 129095 - protein, 10 aa, synthetic construct
QRARGDRGVV

SEQ ID NO: 129096 - protein, 10 aa, synthetic construct
QRVRGDRGVV

SEQ ID NO: 129097 - protein, 10 aa, synthetic construct
QRPRGDRGVV

SEQ ID NO: 129098 - protein, 10 aa, synthetic construct
QRLRGDRGVV

SEQ ID NO: 129099 - protein, 10 aa, synthetic construct
QRIRGDRGVV

SEQ ID NO: 129100 - protein, 10 aa, synthetic construct
QRMRGDRGVV

SEQ ID NO: 129101 - protein, 10 aa, synthetic construct
QRWRGDRGVV

SEQ ID NO: 129102 - protein, 10 aa, synthetic construct
QRFRGDRGVV

SEQ ID NO: 129103 - protein, 10 aa, synthetic construct
QRKRGDRGVV

SEQ ID NO: 129104 - protein, 10 aa, synthetic construct
QRRRGDRGVV

SEQ ID NO: 129105 - protein, 10 aa, synthetic construct
QRHRGDRGVV

SEQ ID NO: 129106 - protein, 10 aa, synthetic construct
QRSRGDRGVV

SEQ ID NO: 129107 - protein, 10 aa, synthetic construct
QRTRGDRGVV

SEQ ID NO: 129108 - protein, 10 aa, synthetic construct
QRYRGDRGVV

SEQ ID NO: 129109 - protein, 10 aa, synthetic construct
QRNRGDRGVV

SEQ ID NO: 129110 - protein, 10 aa, synthetic construct
QRQRGDRGVV

SEQ ID NO: 129111 - protein, 10 aa, synthetic construct
QRDRGDRGVV

SEQ ID NO: 129112 - protein, 10 aa, synthetic construct
QRERGDRGVV

SEQ ID NO: 129113 - protein, 10 aa, synthetic construct
QHGRGDRGVV

SEQ ID NO: 129114 - protein, 10 aa, synthetic construct
QHARGDRGVV

SEQ ID NO: 129115 - protein, 10 aa, synthetic construct
QHVRGDRGVV

SEQ ID NO: 129116 - protein, 10 aa, synthetic construct
QHPRGDRGVV

SEQ ID NO: 129117 - protein, 10 aa, synthetic construct
QHLRGDRGVV

SEQ ID NO: 129118 - protein, 10 aa, synthetic construct
QHIRGDRGVV

SEQ ID NO: 129119 - protein, 10 aa, synthetic construct
QHMRGDRGVV

SEQ ID NO: 129120 - protein, 10 aa, synthetic construct
QHWRGDRGVV

SEQ ID NO: 129121 - protein, 10 aa, synthetic construct
QHFRGDRGVV

SEQ ID NO: 129122 - protein, 10 aa, synthetic construct
QHKRGDRGVV

SEQ ID NO: 129123 - protein, 10 aa, synthetic construct
QHRRGDRGVV

SEQ ID NO: 129124 - protein, 10 aa, synthetic construct
QHHRGDRGVV

SEQ ID NO: 129125 - protein, 10 aa, synthetic construct
QHSRGDRGVV

SEQ ID NO: 129126 - protein, 10 aa, synthetic construct
QHTRGDRGVV

SEQ ID NO: 129127 - protein, 10 aa, synthetic construct
QHYRGDRGVV

SEQ ID NO: 129128 - protein, 10 aa, synthetic construct
QHNRGDRGVV

SEQ ID NO: 129129 - protein, 10 aa, synthetic construct
QHQRGDRGVV

SEQ ID NO: 129130 - protein, 10 aa, synthetic construct
QHDRGDRGVV

SEQ ID NO: 129131 - protein, 10 aa, synthetic construct
QHERGDRGVV

SEQ ID NO: 129132 - protein, 10 aa, synthetic construct
QSGRGDRGVV

SEQ ID NO: 129133 - protein, 10 aa, synthetic construct
QSARGDRGVV

SEQ ID NO: 129134 - protein, 10 aa, synthetic construct
QSVRGDRGVV

SEQ ID NO: 129135 - protein, 10 aa, synthetic construct
QSPRGDRGVV

SEQ ID NO: 129136 - protein, 10 aa, synthetic construct
QSLRGDRGVV

SEQ ID NO: 129137 - protein, 10 aa, synthetic construct
QSIRGDRGVV

SEQ ID NO: 129138 - protein, 10 aa, synthetic construct
QSMRGDRGVV

SEQ ID NO: 129139 - protein, 10 aa, synthetic construct
QSWRGDRGVV

SEQ ID NO: 129140 - protein, 10 aa, synthetic construct
QSFRGDRGVV

SEQ ID NO: 129141 - protein, 10 aa, synthetic construct
QSKRGDRGVV

SEQ ID NO: 129142 - protein, 10 aa, synthetic construct
QSRRGDRGVV

SEQ ID NO: 129143 - protein, 10 aa, synthetic construct
QSHRGDRGVV

SEQ ID NO: 129144 - protein, 10 aa, synthetic construct
QSSRGDRGVV

SEQ ID NO: 129145 - protein, 10 aa, synthetic construct
QSTRGDRGVV

SEQ ID NO: 129146 - protein, 10 aa, synthetic construct
QSYRGDRGVV

SEQ ID NO: 129147 - protein, 10 aa, synthetic construct
QSNRGDRGVV

SEQ ID NO: 129148 - protein, 10 aa, synthetic construct
QSQRGDRGVV

SEQ ID NO: 129149 - protein, 10 aa, synthetic construct
QSDRGDRGVV

SEQ ID NO: 129150 - protein, 10 aa, synthetic construct
QSERGDRGVV

SEQ ID NO: 129151 - protein, 10 aa, synthetic construct
QTGRGDRGVV

SEQ ID NO: 129152 - protein, 10 aa, synthetic construct
QTARGDRGVV

SEQ ID NO: 129153 - protein, 10 aa, synthetic construct
QTVRGDRGVV

SEQ ID NO: 129154 - protein, 10 aa, synthetic construct
QTPRGDRGVV

SEQ ID NO: 129155 - protein, 10 aa, synthetic construct
QTLRGDRGVV

SEQ ID NO: 129156 - protein, 10 aa, synthetic construct
QTIRGDRGVV

SEQ ID NO: 129157 - protein, 10 aa, synthetic construct
QTMRGDRGVV

SEQ ID NO: 129158 - protein, 10 aa, synthetic construct
QTWRGDRGVV

SEQ ID NO: 129159 - protein, 10 aa, synthetic construct
QTFRGDRGVV

SEQ ID NO: 129160 - protein, 10 aa, synthetic construct
QTKRGDRGVV

SEQ ID NO: 129161 - protein, 10 aa, synthetic construct
QTRRGDRGVV

SEQ ID NO: 129162 - protein, 10 aa, synthetic construct
QTHRGDRGVV

SEQ ID NO: 129163 - protein, 10 aa, synthetic construct
QTSRGDRGVV

SEQ ID NO: 129164 - protein, 10 aa, synthetic construct
QTTRGDRGVV

SEQ ID NO: 129165 - protein, 10 aa, synthetic construct
QTYRGDRGVV

SEQ ID NO: 129166 - protein, 10 aa, synthetic construct
QTNRGDRGVV

SEQ ID NO: 129167 - protein, 10 aa, synthetic construct
QTQRGDRGVV

SEQ ID NO: 129168 - protein, 10 aa, synthetic construct
QTDRGDRGVV

SEQ ID NO: 129169 - protein, 10 aa, synthetic construct
QTERGDRGVV

SEQ ID NO: 129170 - protein, 10 aa, synthetic construct
QYGRGDRGVV

SEQ ID NO: 129171 - protein, 10 aa, synthetic construct
QYARGDRGVV

SEQ ID NO: 129172 - protein, 10 aa, synthetic construct
QYVRGDRGVV

SEQ ID NO: 129173 - protein, 10 aa, synthetic construct
QYPRGDRGVV

SEQ ID NO: 129174 - protein, 10 aa, synthetic construct
QYLRGDRGVV

SEQ ID NO: 129175 - protein, 10 aa, synthetic construct
QYIRGDRGVV

SEQ ID NO: 129176 - protein, 10 aa, synthetic construct
QYMRGDRGVV

SEQ ID NO: 129177 - protein, 10 aa, synthetic construct
QYWRGDRGVV

SEQ ID NO: 129178 - protein, 10 aa, synthetic construct
QYFRGDRGVV

SEQ ID NO: 129179 - protein, 10 aa, synthetic construct
QYKRGDRGVV

SEQ ID NO: 129180 - protein, 10 aa, synthetic construct
QYRRGDRGVV

SEQ ID NO: 129181 - protein, 10 aa, synthetic construct
QYHRGDRGVV

SEQ ID NO: 129182 - protein, 10 aa, synthetic construct
QYSRGDRGVV

SEQ ID NO: 129183 - protein, 10 aa, synthetic construct
QYTRGDRGVV

SEQ ID NO: 129184 - protein, 10 aa, synthetic construct
QYYRGDRGVV

SEQ ID NO: 129185 - protein, 10 aa, synthetic construct
QYNRGDRGVV

SEQ ID NO: 129186 - protein, 10 aa, synthetic construct
QYQRGDRGVV

SEQ ID NO: 129187 - protein, 10 aa, synthetic construct
QYDRGDRGVV

SEQ ID NO: 129188 - protein, 10 aa, synthetic construct
QYERGDRGVV

SEQ ID NO: 129189 - protein, 10 aa, synthetic construct
QNGRGDRGVV

SEQ ID NO: 129190 - protein, 10 aa, synthetic construct
QNARGDRGVV

SEQ ID NO: 129191 - protein, 10 aa, synthetic construct
QNVRGDRGVV

SEQ ID NO: 129192 - protein, 10 aa, synthetic construct
QNPRGDRGVV

SEQ ID NO: 129193 - protein, 10 aa, synthetic construct
QNLRGDRGVV

SEQ ID NO: 129194 - protein, 10 aa, synthetic construct
QNIRGDRGVV

SEQ ID NO: 129195 - protein, 10 aa, synthetic construct
QNMRGDRGVV

SEQ ID NO: 129196 - protein, 10 aa, synthetic construct
QNWRGDRGVV

SEQ ID NO: 129197 - protein, 10 aa, synthetic construct
QNFRGDRGVV

SEQ ID NO: 129198 - protein, 10 aa, synthetic construct
QNKRGDRGVV

SEQ ID NO: 129199 - protein, 10 aa, synthetic construct
QNRRGDRGVV

SEQ ID NO: 129200 - protein, 10 aa, synthetic construct
QNHRGDRGVV

SEQ ID NO: 129201 - protein, 10 aa, synthetic construct
QNSRGDRGVV

SEQ ID NO: 129202 - protein, 10 aa, synthetic construct
QNTRGDRGVV

SEQ ID NO: 129203 - protein, 10 aa, synthetic construct
QNYRGDRGVV

SEQ ID NO: 129204 - protein, 10 aa, synthetic construct
QNNRGDRGVV

SEQ ID NO: 129205 - protein, 10 aa, synthetic construct
QNQRGDRGVV

SEQ ID NO: 129206 - protein, 10 aa, synthetic construct
QNDRGDRGVV

SEQ ID NO: 129207 - protein, 10 aa, synthetic construct
QNERGDRGVV

SEQ ID NO: 129208 - protein, 10 aa, synthetic construct
QQGRGDRGVV

SEQ ID NO: 129209 - protein, 10 aa, synthetic construct
QQARGDRGVV

SEQ ID NO: 129210 - protein, 10 aa, synthetic construct
QQVRGDRGVV

SEQ ID NO: 129211 - protein, 10 aa, synthetic construct
QQPRGDRGVV

SEQ ID NO: 129212 - protein, 10 aa, synthetic construct
QQLRGDRGVV

SEQ ID NO: 129213 - protein, 10 aa, synthetic construct
QQIRGDRGVV

SEQ ID NO: 129214 - protein, 10 aa, synthetic construct
QQMRGDRGVV

SEQ ID NO: 129215 - protein, 10 aa, synthetic construct
QQWRGDRGVV

SEQ ID NO: 129216 - protein, 10 aa, synthetic construct
QQFRGDRGVV

SEQ ID NO: 129217 - protein, 10 aa, synthetic construct
QQKRGDRGVV

SEQ ID NO: 129218 - protein, 10 aa, synthetic construct
QQRRGDRGVV

SEQ ID NO: 129219 - protein, 10 aa, synthetic construct
QQHRGDRGVV

SEQ ID NO: 129220 - protein, 10 aa, synthetic construct
QQSRGDRGVV

SEQ ID NO: 129221 - protein, 10 aa, synthetic construct
QQTRGDRGVV

SEQ ID NO: 129222 - protein, 10 aa, synthetic construct
QQYRGDRGVV

SEQ ID NO: 129223 - protein, 10 aa, synthetic construct
QQNRGDRGVV

SEQ ID NO: 129224 - protein, 10 aa, synthetic construct
QQQRGDRGVV

SEQ ID NO: 129225 - protein, 10 aa, synthetic construct
QQDRGDRGVV

SEQ ID NO: 129226 - protein, 10 aa, synthetic construct
QQERGDRGVV

SEQ ID NO: 129227 - protein, 10 aa, synthetic construct
QDGRGDRGVV

SEQ ID NO: 129228 - protein, 10 aa, synthetic construct
QDARGDRGVV

SEQ ID NO: 129229 - protein, 10 aa, synthetic construct
QDVRGDRGVV

SEQ ID NO: 129230 - protein, 10 aa, synthetic construct
QDPRGDRGVV

SEQ ID NO: 129231 - protein, 10 aa, synthetic construct
QDLRGDRGVV

SEQ ID NO: 129232 - protein, 10 aa, synthetic construct
QDIRGDRGVV

SEQ ID NO: 129233 - protein, 10 aa, synthetic construct
QDMRGDRGVV

SEQ ID NO: 129234 - protein, 10 aa, synthetic construct
QDWRGDRGVV

SEQ ID NO: 129235 - protein, 10 aa, synthetic construct
QDFRGDRGVV

SEQ ID NO: 129236 - protein, 10 aa, synthetic construct
QDKRGDRGVV

SEQ ID NO: 129237 - protein, 10 aa, synthetic construct
QDRRGDRGVV

SEQ ID NO: 129238 - protein, 10 aa, synthetic construct
QDHRGDRGVV

SEQ ID NO: 129239 - protein, 10 aa, synthetic construct
QDSRGDRGVV

SEQ ID NO: 129240 - protein, 10 aa, synthetic construct
QDTRGDRGVV

SEQ ID NO: 129241 - protein, 10 aa, synthetic construct
QDYRGDRGVV

SEQ ID NO: 129242 - protein, 10 aa, synthetic construct
QDNRGDRGVV

SEQ ID NO: 129243 - protein, 10 aa, synthetic construct
QDQRGDRGVV

SEQ ID NO: 129244 - protein, 10 aa, synthetic construct
QDDRGDRGVV

SEQ ID NO: 129245 - protein, 10 aa, synthetic construct
QDERGDRGVV

SEQ ID NO: 129246 - protein, 10 aa, synthetic construct
QEGRGDRGVV

SEQ ID NO: 129247 - protein, 10 aa, synthetic construct
QEARGDRGVV

SEQ ID NO: 129248 - protein, 10 aa, synthetic construct
QEVRGDRGVV

SEQ ID NO: 129249 - protein, 10 aa, synthetic construct
QEPRGDRGVV

SEQ ID NO: 129250 - protein, 10 aa, synthetic construct
QELRGDRGVV

SEQ ID NO: 129251 - protein, 10 aa, synthetic construct
QEIRGDRGVV

SEQ ID NO: 129252 - protein, 10 aa, synthetic construct
QEMRGDRGVV

SEQ ID NO: 129253 - protein, 10 aa, synthetic construct
QEWRGDRGVV

SEQ ID NO: 129254 - protein, 10 aa, synthetic construct
QEFRGDRGVV

SEQ ID NO: 129255 - protein, 10 aa, synthetic construct
QEKRGDRGVV

SEQ ID NO: 129256 - protein, 10 aa, synthetic construct
QERRGDRGVV

SEQ ID NO: 129257 - protein, 10 aa, synthetic construct
QEHRGDRGVV

SEQ ID NO: 129258 - protein, 10 aa, synthetic construct
QESRGDRGVV

SEQ ID NO: 129259 - protein, 10 aa, synthetic construct
QETRGDRGVV

SEQ ID NO: 129260 - protein, 10 aa, synthetic construct
QEYRGDRGVV

SEQ ID NO: 129261 - protein, 10 aa, synthetic construct
QENRGDRGVV

SEQ ID NO: 129262 - protein, 10 aa, synthetic construct
QEQRGDRGVV

SEQ ID NO: 129263 - protein, 10 aa, synthetic construct
QEDRGDRGVV

SEQ ID NO: 129264 - protein, 10 aa, synthetic construct
QEERGDRGVV

SEQ ID NO: 129265 - protein, 10 aa, synthetic construct
SGGRGDRNVV

SEQ ID NO: 129266 - protein, 10 aa, synthetic construct
SGARGDRNVV

SEQ ID NO: 129267 - protein, 10 aa, synthetic construct
SGVRGDRNVV

SEQ ID NO: 129268 - protein, 10 aa, synthetic construct
SGPRGDRNVV

SEQ ID NO: 129269 - protein, 10 aa, synthetic construct
SGLRGDRNVV

SEQ ID NO: 129270 - protein, 10 aa, synthetic construct
SGIRGDRNVV

SEQ ID NO: 129271 - protein, 10 aa, synthetic construct
SGMRGDRNVV

SEQ ID NO: 129272 - protein, 10 aa, synthetic construct
SGWRGDRNVV

SEQ ID NO: 129273 - protein, 10 aa, synthetic construct
SGFRGDRNVV

SEQ ID NO: 129274 - protein, 10 aa, synthetic construct
SGKRGDRNVV

SEQ ID NO: 129275 - protein, 10 aa, synthetic construct
SGRRGDRNVV

SEQ ID NO: 129276 - protein, 10 aa, synthetic construct
SGHRGDRNVV

SEQ ID NO: 129277 - protein, 10 aa, synthetic construct
SGSRGDRNVV

SEQ ID NO: 129278 - protein, 10 aa, synthetic construct
SGTRGDRNVV

SEQ ID NO: 129279 - protein, 10 aa, synthetic construct
SGYRGDRNVV

SEQ ID NO: 129280 - protein, 10 aa, synthetic construct
SGNRGDRNVV

SEQ ID NO: 129281 - protein, 10 aa, synthetic construct
SGQRGDRNVV

SEQ ID NO: 129282 - protein, 10 aa, synthetic construct
SGDRGDRNVV

SEQ ID NO: 129283 - protein, 10 aa, synthetic construct
SGERGDRNVV

SEQ ID NO: 129284 - protein, 10 aa, synthetic construct
SAGRGDRNVV

SEQ ID NO: 129285 - protein, 10 aa, synthetic construct
SAARGDRNVV

SEQ ID NO: 129286 - protein, 10 aa, synthetic construct
SAVRGDRNVV

SEQ ID NO: 129287 - protein, 10 aa, synthetic construct
SAPRGDRNVV

SEQ ID NO: 129288 - protein, 10 aa, synthetic construct
SALRGDRNVV

SEQ ID NO: 129289 - protein, 10 aa, synthetic construct
SAIRGDRNVV

SEQ ID NO: 129290 - protein, 10 aa, synthetic construct
SAMRGDRNVV

SEQ ID NO: 129291 - protein, 10 aa, synthetic construct
SAWRGDRNVV

SEQ ID NO: 129292 - protein, 10 aa, synthetic construct
SAFRGDRNVV

SEQ ID NO: 129293 - protein, 10 aa, synthetic construct
SAKRGDRNVV

SEQ ID NO: 129294 - protein, 10 aa, synthetic construct
SARRGDRNVV

SEQ ID NO: 129295 - protein, 10 aa, synthetic construct
SAHRGDRNVV

SEQ ID NO: 129296 - protein, 10 aa, synthetic construct
SASRGDRNVV

SEQ ID NO: 129297 - protein, 10 aa, synthetic construct
SATRGDRNVV

SEQ ID NO: 129298 - protein, 10 aa, synthetic construct
SAYRGDRNVV

SEQ ID NO: 129299 - protein, 10 aa, synthetic construct
SANRGDRNVV

SEQ ID NO: 129300 - protein, 10 aa, synthetic construct
SAQRGDRNVV

SEQ ID NO: 129301 - protein, 10 aa, synthetic construct
SADRGDRNVV

SEQ ID NO: 129302 - protein, 10 aa, synthetic construct
SAERGDRNVV

SEQ ID NO: 129303 - protein, 10 aa, synthetic construct
SVGRGDRNVV

SEQ ID NO: 129304 - protein, 10 aa, synthetic construct
SVARGDRNVV

SEQ ID NO: 129305 - protein, 10 aa, synthetic construct
SVVRGDRNVV

SEQ ID NO: 129306 - protein, 10 aa, synthetic construct
SVPRGDRNVV

SEQ ID NO: 129307 - protein, 10 aa, synthetic construct
SVLRGDRNVV

SEQ ID NO: 129308 - protein, 10 aa, synthetic construct
SVIRGDRNVV

SEQ ID NO: 129309 - protein, 10 aa, synthetic construct
SVMRGDRNVV

SEQ ID NO: 129310 - protein, 10 aa, synthetic construct
SVWRGDRNVV

SEQ ID NO: 129311 - protein, 10 aa, synthetic construct
SVFRGDRNVV

SEQ ID NO: 129312 - protein, 10 aa, synthetic construct
SVKRGDRNVV

SEQ ID NO: 129313 - protein, 10 aa, synthetic construct
SVRRGDRNVV

SEQ ID NO: 129314 - protein, 10 aa, synthetic construct
SVHRGDRNVV

SEQ ID NO: 129315 - protein, 10 aa, synthetic construct
SVSRGDRNVV

SEQ ID NO: 129316 - protein, 10 aa, synthetic construct
SVTRGDRNVV

SEQ ID NO: 129317 - protein, 10 aa, synthetic construct
SVYRGDRNVV

SEQ ID NO: 129318 - protein, 10 aa, synthetic construct
SVNRGDRNVV

SEQ ID NO: 129319 - protein, 10 aa, synthetic construct
SVQRGDRNVV

SEQ ID NO: 129320 - protein, 10 aa, synthetic construct
SVDRGDRNVV

SEQ ID NO: 129321 - protein, 10 aa, synthetic construct
SVERGDRNVV

SEQ ID NO: 129322 - protein, 10 aa, synthetic construct
SPGRGDRNVV

SEQ ID NO: 129323 - protein, 10 aa, synthetic construct
SPARGDRNVV

SEQ ID NO: 129324 - protein, 10 aa, synthetic construct
SPVRGDRNVV

SEQ ID NO: 129325 - protein, 10 aa, synthetic construct
SPPRGDRNVV

SEQ ID NO: 129326 - protein, 10 aa, synthetic construct
SPLRGDRNVV

SEQ ID NO: 129327 - protein, 10 aa, synthetic construct
SPIRGDRNVV

SEQ ID NO: 129328 - protein, 10 aa, synthetic construct
SPMRGDRNVV

SEQ ID NO: 129329 - protein, 10 aa, synthetic construct
SPWRGDRNVV

SEQ ID NO: 129330 - protein, 10 aa, synthetic construct
SPFRGDRNVV

SEQ ID NO: 129331 - protein, 10 aa, synthetic construct
SPKRGDRNVV

SEQ ID NO: 129332 - protein, 10 aa, synthetic construct
SPRRGDRNVV

SEQ ID NO: 129333 - protein, 10 aa, synthetic construct
SPHRGDRNVV

SEQ ID NO: 129334 - protein, 10 aa, synthetic construct
SPSRGDRNVV

SEQ ID NO: 129335 - protein, 10 aa, synthetic construct
SPTRGDRNVV

SEQ ID NO: 129336 - protein, 10 aa, synthetic construct
SPYRGDRNVV

SEQ ID NO: 129337 - protein, 10 aa, synthetic construct
SPNRGDRNVV

SEQ ID NO: 129338 - protein, 10 aa, synthetic construct
SPQRGDRNVV

SEQ ID NO: 129339 - protein, 10 aa, synthetic construct
SPDRGDRNVV

SEQ ID NO: 129340 - protein, 10 aa, synthetic construct
SPERGDRNVV

SEQ ID NO: 129341 - protein, 10 aa, synthetic construct
SLGRGDRNVV

SEQ ID NO: 129342 - protein, 10 aa, synthetic construct
SLARGDRNVV

SEQ ID NO: 129343 - protein, 10 aa, synthetic construct
SLVRGDRNVV

SEQ ID NO: 129344 - protein, 10 aa, synthetic construct
SLPRGDRNVV

SEQ ID NO: 129345 - protein, 10 aa, synthetic construct
SLLRGDRNVV

SEQ ID NO: 129346 - protein, 10 aa, synthetic construct
SLIRGDRNVV

SEQ ID NO: 129347 - protein, 10 aa, synthetic construct
SLMRGDRNVV

SEQ ID NO: 129348 - protein, 10 aa, synthetic construct
SLWRGDRNVV

SEQ ID NO: 129349 - protein, 10 aa, synthetic construct
SLFRGDRNVV

SEQ ID NO: 129350 - protein, 10 aa, synthetic construct
SLKRGDRNVV

SEQ ID NO: 129351 - protein, 10 aa, synthetic construct
SLRRGDRNVV

SEQ ID NO: 129352 - protein, 10 aa, synthetic construct
SLHRGDRNVV

SEQ ID NO: 129353 - protein, 10 aa, synthetic construct
SLSRGDRNVV

SEQ ID NO: 129354 - protein, 10 aa, synthetic construct
SLTRGDRNVV

SEQ ID NO: 129355 - protein, 10 aa, synthetic construct
SLYRGDRNVV

SEQ ID NO: 129356 - protein, 10 aa, synthetic construct
SLNRGDRNVV

SEQ ID NO: 129357 - protein, 10 aa, synthetic construct
SLQRGDRNVV

SEQ ID NO: 129358 - protein, 10 aa, synthetic construct
SLDRGDRNVV

SEQ ID NO: 129359 - protein, 10 aa, synthetic construct
SLERGDRNVV

SEQ ID NO: 129360 - protein, 10 aa, synthetic construct
SIGRGDRNVV

SEQ ID NO: 129361 - protein, 10 aa, synthetic construct
SIARGDRNVV

SEQ ID NO: 129362 - protein, 10 aa, synthetic construct
SIVRGDRNVV

SEQ ID NO: 129363 - protein, 10 aa, synthetic construct
SIPRGDRNVV

SEQ ID NO: 129364 - protein, 10 aa, synthetic construct
SILRGDRNVV

SEQ ID NO: 129365 - protein, 10 aa, synthetic construct
SIIRGDRNVV

SEQ ID NO: 129366 - protein, 10 aa, synthetic construct
SIMRGDRNVV

SEQ ID NO: 129367 - protein, 10 aa, synthetic construct
SIWRGDRNVV

SEQ ID NO: 129368 - protein, 10 aa, synthetic construct
SIFRGDRNVV

SEQ ID NO: 129369 - protein, 10 aa, synthetic construct
SIKRGDRNVV

SEQ ID NO: 129370 - protein, 10 aa, synthetic construct
SIRRGDRNVV

SEQ ID NO: 129371 - protein, 10 aa, synthetic construct
SIHRGDRNVV

SEQ ID NO: 129372 - protein, 10 aa, synthetic construct
SISRGDRNVV

SEQ ID NO: 129373 - protein, 10 aa, synthetic construct
SITRGDRNVV

SEQ ID NO: 129374 - protein, 10 aa, synthetic construct
SIYRGDRNVV

SEQ ID NO: 129375 - protein, 10 aa, synthetic construct
SINRGDRNVV

SEQ ID NO: 129376 - protein, 10 aa, synthetic construct
SIQRGDRNVV

SEQ ID NO: 129377 - protein, 10 aa, synthetic construct
SIDRGDRNVV

SEQ ID NO: 129378 - protein, 10 aa, synthetic construct
SIERGDRNVV

SEQ ID NO: 129379 - protein, 10 aa, synthetic construct
SMGRGDRNVV

SEQ ID NO: 129380 - protein, 10 aa, synthetic construct
SMARGDRNVV

SEQ ID NO: 129381 - protein, 10 aa, synthetic construct
SMVRGDRNVV

SEQ ID NO: 129382 - protein, 10 aa, synthetic construct
SMPRGDRNVV

SEQ ID NO: 129383 - protein, 10 aa, synthetic construct
SMLRGDRNVV

SEQ ID NO: 129384 - protein, 10 aa, synthetic construct
SMIRGDRNVV

SEQ ID NO: 129385 - protein, 10 aa, synthetic construct
SMMRGDRNVV

SEQ ID NO: 129386 - protein, 10 aa, synthetic construct
SMWRGDRNVV

SEQ ID NO: 129387 - protein, 10 aa, synthetic construct
SMFRGDRNVV

SEQ ID NO: 129388 - protein, 10 aa, synthetic construct
SMKRGDRNVV

SEQ ID NO: 129389 - protein, 10 aa, synthetic construct
SMRRGDRNVV

SEQ ID NO: 129390 - protein, 10 aa, synthetic construct
SMHRGDRNVV

SEQ ID NO: 129391 - protein, 10 aa, synthetic construct
SMSRGDRNVV

SEQ ID NO: 129392 - protein, 10 aa, synthetic construct
SMTRGDRNVV

SEQ ID NO: 129393 - protein, 10 aa, synthetic construct
SMYRGDRNVV

SEQ ID NO: 129394 - protein, 10 aa, synthetic construct
SMNRGDRNVV

SEQ ID NO: 129395 - protein, 10 aa, synthetic construct
SMQRGDRNVV

SEQ ID NO: 129396 - protein, 10 aa, synthetic construct
SMDRGDRNVV

SEQ ID NO: 129397 - protein, 10 aa, synthetic construct
SMERGDRNVV

SEQ ID NO: 129398 - protein, 10 aa, synthetic construct
SWGRGDRNVV

SEQ ID NO: 129399 - protein, 10 aa, synthetic construct
SWARGDRNVV

SEQ ID NO: 129400 - protein, 10 aa, synthetic construct
SWVRGDRNVV

SEQ ID NO: 129401 - protein, 10 aa, synthetic construct
SWPRGDRNVV

SEQ ID NO: 129402 - protein, 10 aa, synthetic construct
SWLRGDRNVV

SEQ ID NO: 129403 - protein, 10 aa, synthetic construct
SWIRGDRNVV

SEQ ID NO: 129404 - protein, 10 aa, synthetic construct
SWMRGDRNVV

SEQ ID NO: 129405 - protein, 10 aa, synthetic construct
SWWRGDRNVV

SEQ ID NO: 129406 - protein, 10 aa, synthetic construct
SWFRGDRNVV

SEQ ID NO: 129407 - protein, 10 aa, synthetic construct
SWKRGDRNVV

SEQ ID NO: 129408 - protein, 10 aa, synthetic construct
SWRRGDRNVV

SEQ ID NO: 129409 - protein, 10 aa, synthetic construct
SWHRGDRNVV

SEQ ID NO: 129410 - protein, 10 aa, synthetic construct
SWSRGDRNVV

SEQ ID NO: 129411 - protein, 10 aa, synthetic construct
SWTRGDRNVV

SEQ ID NO: 129412 - protein, 10 aa, synthetic construct
SWYRGDRNVV

SEQ ID NO: 129413 - protein, 10 aa, synthetic construct
SWNRGDRNVV

SEQ ID NO: 129414 - protein, 10 aa, synthetic construct
SWQRGDRNVV

SEQ ID NO: 129415 - protein, 10 aa, synthetic construct
SWDRGDRNVV

SEQ ID NO: 129416 - protein, 10 aa, synthetic construct
SWERGDRNVV

SEQ ID NO: 129417 - protein, 10 aa, synthetic construct
SFGRGDRNVV

SEQ ID NO: 129418 - protein, 10 aa, synthetic construct
SFARGDRNVV

SEQ ID NO: 129419 - protein, 10 aa, synthetic construct
SFVRGDRNVV

SEQ ID NO: 129420 - protein, 10 aa, synthetic construct
SFPRGDRNVV

SEQ ID NO: 129421 - protein, 10 aa, synthetic construct
SFLRGDRNVV

SEQ ID NO: 129422 - protein, 10 aa, synthetic construct
SFIRGDRNVV

SEQ ID NO: 129423 - protein, 10 aa, synthetic construct
SFMRGDRNVV

SEQ ID NO: 129424 - protein, 10 aa, synthetic construct
SFWRGDRNVV

SEQ ID NO: 129425 - protein, 10 aa, synthetic construct
SFFRGDRNVV

SEQ ID NO: 129426 - protein, 10 aa, synthetic construct
SFKRGDRNVV

SEQ ID NO: 129427 - protein, 10 aa, synthetic construct
SFRRGDRNVV

SEQ ID NO: 129428 - protein, 10 aa, synthetic construct
SFHRGDRNVV

SEQ ID NO: 129429 - protein, 10 aa, synthetic construct
SFSRGDRNVV

SEQ ID NO: 129430 - protein, 10 aa, synthetic construct
SFTRGDRNVV

SEQ ID NO: 129431 - protein, 10 aa, synthetic construct
SFYRGDRNVV

SEQ ID NO: 129432 - protein, 10 aa, synthetic construct
SFNRGDRNVV

SEQ ID NO: 129433 - protein, 10 aa, synthetic construct
SFQRGDRNVV

SEQ ID NO: 129434 - protein, 10 aa, synthetic construct
SFDRGDRNVV

SEQ ID NO: 129435 - protein, 10 aa, synthetic construct
SFERGDRNVV

SEQ ID NO: 129436 - protein, 10 aa, synthetic construct
SKGRGDRNVV

SEQ ID NO: 129437 - protein, 10 aa, synthetic construct
SKARGDRNVV

SEQ ID NO: 129438 - protein, 10 aa, synthetic construct
SKVRGDRNVV

SEQ ID NO: 129439 - protein, 10 aa, synthetic construct
SKPRGDRNVV

SEQ ID NO: 129440 - protein, 10 aa, synthetic construct
SKLRGDRNVV

SEQ ID NO: 129441 - protein, 10 aa, synthetic construct
SKIRGDRNVV

SEQ ID NO: 129442 - protein, 10 aa, synthetic construct
SKMRGDRNVV

SEQ ID NO: 129443 - protein, 10 aa, synthetic construct
SKWRGDRNVV

SEQ ID NO: 129444 - protein, 10 aa, synthetic construct
SKFRGDRNVV

SEQ ID NO: 129445 - protein, 10 aa, synthetic construct
SKKRGDRNVV

SEQ ID NO: 129446 - protein, 10 aa, synthetic construct
SKRRGDRNVV

SEQ ID NO: 129447 - protein, 10 aa, synthetic construct
SKHRGDRNVV

SEQ ID NO: 129448 - protein, 10 aa, synthetic construct
SKSRGDRNVV

SEQ ID NO: 129449 - protein, 10 aa, synthetic construct
SKTRGDRNVV

SEQ ID NO: 129450 - protein, 10 aa, synthetic construct
SKYRGDRNVV

SEQ ID NO: 129451 - protein, 10 aa, synthetic construct
SKNRGDRNVV

SEQ ID NO: 129452 - protein, 10 aa, synthetic construct
SKQRGDRNVV

SEQ ID NO: 129453 - protein, 10 aa, synthetic construct
SKDRGDRNVV

SEQ ID NO: 129454 - protein, 10 aa, synthetic construct
SKERGDRNVV

SEQ ID NO: 129455 - protein, 10 aa, synthetic construct
SRGRGDRNVV

SEQ ID NO: 129456 - protein, 10 aa, synthetic construct
SRARGDRNVV

SEQ ID NO: 129457 - protein, 10 aa, synthetic construct
SRVRGDRNVV

SEQ ID NO: 129458 - protein, 10 aa, synthetic construct
SRPRGDRNVV

SEQ ID NO: 129459 - protein, 10 aa, synthetic construct
SRLRGDRNVV

SEQ ID NO: 129460 - protein, 10 aa, synthetic construct
SRIRGDRNVV

SEQ ID NO: 129461 - protein, 10 aa, synthetic construct
SRMRGDRNVV

SEQ ID NO: 129462 - protein, 10 aa, synthetic construct
SRWRGDRNVV

SEQ ID NO: 129463 - protein, 10 aa, synthetic construct
SRFRGDRNVV

SEQ ID NO: 129464 - protein, 10 aa, synthetic construct
SRKRGDRNVV

SEQ ID NO: 129465 - protein, 10 aa, synthetic construct
SRRRGDRNVV

SEQ ID NO: 129466 - protein, 10 aa, synthetic construct
SRHRGDRNVV

SEQ ID NO: 129467 - protein, 10 aa, synthetic construct
SRSRGDRNVV

SEQ ID NO: 129468 - protein, 10 aa, synthetic construct
SRTRGDRNVV

SEQ ID NO: 129469 - protein, 10 aa, synthetic construct
SRYRGDRNVV

SEQ ID NO: 129470 - protein, 10 aa, synthetic construct
SRNRGDRNVV

SEQ ID NO: 129471 - protein, 10 aa, synthetic construct
SRQRGDRNVV

SEQ ID NO: 129472 - protein, 10 aa, synthetic construct
SRDRGDRNVV

SEQ ID NO: 129473 - protein, 10 aa, synthetic construct
SRERGDRNVV

SEQ ID NO: 129474 - protein, 10 aa, synthetic construct
SHGRGDRNVV

SEQ ID NO: 129475 - protein, 10 aa, synthetic construct
SHARGDRNVV

SEQ ID NO: 129476 - protein, 10 aa, synthetic construct
SHVRGDRNVV

SEQ ID NO: 129477 - protein, 10 aa, synthetic construct
SHPRGDRNVV

SEQ ID NO: 129478 - protein, 10 aa, synthetic construct
SHLRGDRNVV

SEQ ID NO: 129479 - protein, 10 aa, synthetic construct
SHIRGDRNVV

SEQ ID NO: 129480 - protein, 10 aa, synthetic construct
SHMRGDRNVV

SEQ ID NO: 129481 - protein, 10 aa, synthetic construct
SHWRGDRNVV

SEQ ID NO: 129482 - protein, 10 aa, synthetic construct
SHFRGDRNVV

SEQ ID NO: 129483 - protein, 10 aa, synthetic construct
SHKRGDRNVV

SEQ ID NO: 129484 - protein, 10 aa, synthetic construct
SHRRGDRNVV

SEQ ID NO: 129485 - protein, 10 aa, synthetic construct
SHHRGDRNVV

SEQ ID NO: 129486 - protein, 10 aa, synthetic construct
SHSRGDRNVV

SEQ ID NO: 129487 - protein, 10 aa, synthetic construct
SHTRGDRNVV

SEQ ID NO: 129488 - protein, 10 aa, synthetic construct
SHYRGDRNVV

SEQ ID NO: 129489 - protein, 10 aa, synthetic construct
SHNRGDRNVV

SEQ ID NO: 129490 - protein, 10 aa, synthetic construct
SHQRGDRNVV

SEQ ID NO: 129491 - protein, 10 aa, synthetic construct
SHDRGDRNVV

SEQ ID NO: 129492 - protein, 10 aa, synthetic construct
SHERGDRNVV

SEQ ID NO: 129493 - protein, 10 aa, synthetic construct
SSGRGDRNVV

SEQ ID NO: 129494 - protein, 10 aa, synthetic construct
SSARGDRNVV

SEQ ID NO: 129495 - protein, 10 aa, synthetic construct
SSVRGDRNVV

SEQ ID NO: 129496 - protein, 10 aa, synthetic construct
SSPRGDRNVV

SEQ ID NO: 129497 - protein, 10 aa, synthetic construct
SSLRGDRNVV

SEQ ID NO: 129498 - protein, 10 aa, synthetic construct
SSIRGDRNVV

SEQ ID NO: 129499 - protein, 10 aa, synthetic construct
SSMRGDRNVV

SEQ ID NO: 129500 - protein, 10 aa, synthetic construct
SSWRGDRNVV

SEQ ID NO: 129501 - protein, 10 aa, synthetic construct
SSFRGDRNVV

SEQ ID NO: 129502 - protein, 10 aa, synthetic construct
SSKRGDRNVV

SEQ ID NO: 129503 - protein, 10 aa, synthetic construct
SSRRGDRNVV

SEQ ID NO: 129504 - protein, 10 aa, synthetic construct
SSHRGDRNVV

SEQ ID NO: 129505 - protein, 10 aa, synthetic construct
SSSRGDRNVV

SEQ ID NO: 129506 - protein, 10 aa, synthetic construct
SSTRGDRNVV

SEQ ID NO: 129507 - protein, 10 aa, synthetic construct
SSYRGDRNVV

SEQ ID NO: 129508 - protein, 10 aa, synthetic construct
SSNRGDRNVV

SEQ ID NO: 129509 - protein, 10 aa, synthetic construct
SSQRGDRNVV

SEQ ID NO: 129510 - protein, 10 aa, synthetic construct
SSDRGDRNVV

SEQ ID NO: 129511 - protein, 10 aa, synthetic construct
SSERGDRNVV

SEQ ID NO: 129512 - protein, 10 aa, synthetic construct
STGRGDRNVV

SEQ ID NO: 129513 - protein, 10 aa, synthetic construct
STARGDRNVV

SEQ ID NO: 129514 - protein, 10 aa, synthetic construct
STVRGDRNVV

SEQ ID NO: 129515 - protein, 10 aa, synthetic construct
STPRGDRNVV

SEQ ID NO: 129516 - protein, 10 aa, synthetic construct
STLRGDRNVV

SEQ ID NO: 129517 - protein, 10 aa, synthetic construct
STIRGDRNVV

SEQ ID NO: 129518 - protein, 10 aa, synthetic construct
STMRGDRNVV

SEQ ID NO: 129519 - protein, 10 aa, synthetic construct
STWRGDRNVV

SEQ ID NO: 129520 - protein, 10 aa, synthetic construct
STFRGDRNVV

SEQ ID NO: 129521 - protein, 10 aa, synthetic construct
STKRGDRNVV

SEQ ID NO: 129522 - protein, 10 aa, synthetic construct
STRRGDRNVV

SEQ ID NO: 129523 - protein, 10 aa, synthetic construct
STHRGDRNVV

SEQ ID NO: 129524 - protein, 10 aa, synthetic construct
STSRGDRNVV

SEQ ID NO: 129525 - protein, 10 aa, synthetic construct
STTRGDRNVV

SEQ ID NO: 129526 - protein, 10 aa, synthetic construct
STYRGDRNVV

SEQ ID NO: 129527 - protein, 10 aa, synthetic construct
STNRGDRNVV

SEQ ID NO: 129528 - protein, 10 aa, synthetic construct
STQRGDRNVV

SEQ ID NO: 129529 - protein, 10 aa, synthetic construct
STDRGDRNVV

SEQ ID NO: 129530 - protein, 10 aa, synthetic construct
STERGDRNVV

SEQ ID NO: 129531 - protein, 10 aa, synthetic construct
SYGRGDRNVV

SEQ ID NO: 129532 - protein, 10 aa, synthetic construct
SYARGDRNVV

SEQ ID NO: 129533 - protein, 10 aa, synthetic construct
SYVRGDRNVV

SEQ ID NO: 129534 - protein, 10 aa, synthetic construct
SYPRGDRNVV

SEQ ID NO: 129535 - protein, 10 aa, synthetic construct
SYLRGDRNVV

SEQ ID NO: 129536 - protein, 10 aa, synthetic construct
SYIRGDRNVV

SEQ ID NO: 129537 - protein, 10 aa, synthetic construct
SYMRGDRNVV

SEQ ID NO: 129538 - protein, 10 aa, synthetic construct
SYWRGDRNVV

SEQ ID NO: 129539 - protein, 10 aa, synthetic construct
SYFRGDRNVV

SEQ ID NO: 129540 - protein, 10 aa, synthetic construct
SYKRGDRNVV

SEQ ID NO: 129541 - protein, 10 aa, synthetic construct
SYRRGDRNVV

SEQ ID NO: 129542 - protein, 10 aa, synthetic construct
SYHRGDRNVV

SEQ ID NO: 129543 - protein, 10 aa, synthetic construct
SYSRGDRNVV

SEQ ID NO: 129544 - protein, 10 aa, synthetic construct
SYTRGDRNVV

SEQ ID NO: 129545 - protein, 10 aa, synthetic construct
SYYRGDRNVV

SEQ ID NO: 129546 - protein, 10 aa, synthetic construct
SYNRGDRNVV

SEQ ID NO: 129547 - protein, 10 aa, synthetic construct
SYQRGDRNVV

SEQ ID NO: 129548 - protein, 10 aa, synthetic construct
SYDRGDRNVV

SEQ ID NO: 129549 - protein, 10 aa, synthetic construct
SYERGDRNVV

SEQ ID NO: 129550 - protein, 10 aa, synthetic construct
SNGRGDRNVV

SEQ ID NO: 129551 - protein, 10 aa, synthetic construct
SNARGDRNVV

SEQ ID NO: 129552 - protein, 10 aa, synthetic construct
SNVRGDRNVV

SEQ ID NO: 129553 - protein, 10 aa, synthetic construct
SNPRGDRNVV

SEQ ID NO: 129554 - protein, 10 aa, synthetic construct
SNLRGDRNVV

SEQ ID NO: 129555 - protein, 10 aa, synthetic construct
SNIRGDRNVV

SEQ ID NO: 129556 - protein, 10 aa, synthetic construct
SNMRGDRNVV

SEQ ID NO: 129557 - protein, 10 aa, synthetic construct
SNWRGDRNVV

SEQ ID NO: 129558 - protein, 10 aa, synthetic construct
SNFRGDRNVV

SEQ ID NO: 129559 - protein, 10 aa, synthetic construct
SNKRGDRNVV

SEQ ID NO: 129560 - protein, 10 aa, synthetic construct
SNRRGDRNVV

SEQ ID NO: 129561 - protein, 10 aa, synthetic construct
SNHRGDRNVV

SEQ ID NO: 129562 - protein, 10 aa, synthetic construct
SNSRGDRNVV

SEQ ID NO: 129563 - protein, 10 aa, synthetic construct
SNTRGDRNVV

SEQ ID NO: 129564 - protein, 10 aa, synthetic construct
SNYRGDRNVV

SEQ ID NO: 129565 - protein, 10 aa, synthetic construct
SNNRGDRNVV

SEQ ID NO: 129566 - protein, 10 aa, synthetic construct
SNQRGDRNVV

SEQ ID NO: 129567 - protein, 10 aa, synthetic construct
SNDRGDRNVV

SEQ ID NO: 129568 - protein, 10 aa, synthetic construct
SNERGDRNVV

SEQ ID NO: 129569 - protein, 10 aa, synthetic construct
SQGRGDRNVV

SEQ ID NO: 129570 - protein, 10 aa, synthetic construct
SQARGDRNVV

SEQ ID NO: 129571 - protein, 10 aa, synthetic construct
SQVRGDRNVV

SEQ ID NO: 129572 - protein, 10 aa, synthetic construct
SQPRGDRNVV

SEQ ID NO: 129573 - protein, 10 aa, synthetic construct
SQLRGDRNVV

SEQ ID NO: 129574 - protein, 10 aa, synthetic construct
SQIRGDRNVV

SEQ ID NO: 129575 - protein, 10 aa, synthetic construct
SQMRGDRNVV

SEQ ID NO: 129576 - protein, 10 aa, synthetic construct
SQWRGDRNVV

SEQ ID NO: 129577 - protein, 10 aa, synthetic construct
SQFRGDRNVV

SEQ ID NO: 129578 - protein, 10 aa, synthetic construct
SQKRGDRNVV

SEQ ID NO: 129579 - protein, 10 aa, synthetic construct
SQRRGDRNVV

SEQ ID NO: 129580 - protein, 10 aa, synthetic construct
SQHRGDRNVV

SEQ ID NO: 129581 - protein, 10 aa, synthetic construct
SQSRGDRNVV

SEQ ID NO: 129582 - protein, 10 aa, synthetic construct
SQTRGDRNVV

SEQ ID NO: 129583 - protein, 10 aa, synthetic construct
SQYRGDRNVV

SEQ ID NO: 129584 - protein, 10 aa, synthetic construct
SQNRGDRNVV

SEQ ID NO: 129585 - protein, 10 aa, synthetic construct
SQQRGDRNVV

SEQ ID NO: 129586 - protein, 10 aa, synthetic construct
SQDRGDRNVV

SEQ ID NO: 129587 - protein, 10 aa, synthetic construct
SQERGDRNVV

SEQ ID NO: 129588 - protein, 10 aa, synthetic construct
SDGRGDRNVV

SEQ ID NO: 129589 - protein, 10 aa, synthetic construct
SDARGDRNVV

SEQ ID NO: 129590 - protein, 10 aa, synthetic construct
SDVRGDRNVV

SEQ ID NO: 129591 - protein, 10 aa, synthetic construct
SDPRGDRNVV

SEQ ID NO: 129592 - protein, 10 aa, synthetic construct
SDLRGDRNVV

SEQ ID NO: 129593 - protein, 10 aa, synthetic construct
SDIRGDRNVV

SEQ ID NO: 129594 - protein, 10 aa, synthetic construct
SDMRGDRNVV

SEQ ID NO: 129595 - protein, 10 aa, synthetic construct
SDWRGDRNVV

SEQ ID NO: 129596 - protein, 10 aa, synthetic construct
SDFRGDRNVV

SEQ ID NO: 129597 - protein, 10 aa, synthetic construct
SDKRGDRNVV

SEQ ID NO: 129598 - protein, 10 aa, synthetic construct
SDRRGDRNVV

SEQ ID NO: 129599 - protein, 10 aa, synthetic construct
SDHRGDRNVV

SEQ ID NO: 129600 - protein, 10 aa, synthetic construct
SDSRGDRNVV

SEQ ID NO: 129601 - protein, 10 aa, synthetic construct
SDTRGDRNVV

SEQ ID NO: 129602 - protein, 10 aa, synthetic construct
SDYRGDRNVV

SEQ ID NO: 129603 - protein, 10 aa, synthetic construct
SDNRGDRNVV

SEQ ID NO: 129604 - protein, 10 aa, synthetic construct
SDQRGDRNVV

SEQ ID NO: 129605 - protein, 10 aa, synthetic construct
SDDRGDRNVV

SEQ ID NO: 129606 - protein, 10 aa, synthetic construct
SDERGDRNVV

SEQ ID NO: 129607 - protein, 10 aa, synthetic construct
SEGRGDRNVV

SEQ ID NO: 129608 - protein, 10 aa, synthetic construct
SEARGDRNVV

SEQ ID NO: 129609 - protein, 10 aa, synthetic construct
SEVRGDRNVV

SEQ ID NO: 129610 - protein, 10 aa, synthetic construct
SEPRGDRNVV

SEQ ID NO: 129611 - protein, 10 aa, synthetic construct
SELRGDRNVV

SEQ ID NO: 129612 - protein, 10 aa, synthetic construct
SEIRGDRNVV

SEQ ID NO: 129613 - protein, 10 aa, synthetic construct
SEMRGDRNVV

SEQ ID NO: 129614 - protein, 10 aa, synthetic construct
SEWRGDRNVV

SEQ ID NO: 129615 - protein, 10 aa, synthetic construct
SEFRGDRNVV

SEQ ID NO: 129616 - protein, 10 aa, synthetic construct
SEKRGDRNVV

SEQ ID NO: 129617 - protein, 10 aa, synthetic construct
SERRGDRNVV

SEQ ID NO: 129618 - protein, 10 aa, synthetic construct
SEHRGDRNVV

SEQ ID NO: 129619 - protein, 10 aa, synthetic construct
SESRGDRNVV

SEQ ID NO: 129620 - protein, 10 aa, synthetic construct
SETRGDRNVV

SEQ ID NO: 129621 - protein, 10 aa, synthetic construct
SEYRGDRNVV

SEQ ID NO: 129622 - protein, 10 aa, synthetic construct
SENRGDRNVV

SEQ ID NO: 129623 - protein, 10 aa, synthetic construct
SEQRGDRNVV

SEQ ID NO: 129624 - protein, 10 aa, synthetic construct
SEDRGDRNVV

SEQ ID NO: 129625 - protein, 10 aa, synthetic construct
SEERGDRNVV

SEQ ID NO: 129626 - protein, 10 aa, synthetic construct
TGGRGDRNVV

SEQ ID NO: 129627 - protein, 10 aa, synthetic construct
TGARGDRNVV

SEQ ID NO: 129628 - protein, 10 aa, synthetic construct
TGVRGDRNVV

SEQ ID NO: 129629 - protein, 10 aa, synthetic construct
TGPRGDRNVV

SEQ ID NO: 129630 - protein, 10 aa, synthetic construct
TGLRGDRNVV

SEQ ID NO: 129631 - protein, 10 aa, synthetic construct
TGIRGDRNVV

SEQ ID NO: 129632 - protein, 10 aa, synthetic construct
TGMRGDRNVV

SEQ ID NO: 129633 - protein, 10 aa, synthetic construct
TGWRGDRNVV

SEQ ID NO: 129634 - protein, 10 aa, synthetic construct
TGFRGDRNVV

SEQ ID NO: 129635 - protein, 10 aa, synthetic construct
TGKRGDRNVV

SEQ ID NO: 129636 - protein, 10 aa, synthetic construct
TGRRGDRNVV

SEQ ID NO: 129637 - protein, 10 aa, synthetic construct
TGHRGDRNVV

SEQ ID NO: 129638 - protein, 10 aa, synthetic construct
TGSRGDRNVV

SEQ ID NO: 129639 - protein, 10 aa, synthetic construct
TGTRGDRNVV

SEQ ID NO: 129640 - protein, 10 aa, synthetic construct
TGYRGDRNVV

SEQ ID NO: 129641 - protein, 10 aa, synthetic construct
TGNRGDRNVV

SEQ ID NO: 129642 - protein, 10 aa, synthetic construct
TGQRGDRNVV

SEQ ID NO: 129643 - protein, 10 aa, synthetic construct
TGDRGDRNVV

SEQ ID NO: 129644 - protein, 10 aa, synthetic construct
TGERGDRNVV

SEQ ID NO: 129645 - protein, 10 aa, synthetic construct
TAGRGDRNVV

SEQ ID NO: 129646 - protein, 10 aa, synthetic construct
TAARGDRNVV

SEQ ID NO: 129647 - protein, 10 aa, synthetic construct
TAVRGDRNVV

SEQ ID NO: 129648 - protein, 10 aa, synthetic construct
TAPRGDRNVV

SEQ ID NO: 129649 - protein, 10 aa, synthetic construct
TALRGDRNVV

SEQ ID NO: 129650 - protein, 10 aa, synthetic construct
TAIRGDRNVV

SEQ ID NO: 129651 - protein, 10 aa, synthetic construct
TAMRGDRNVV

SEQ ID NO: 129652 - protein, 10 aa, synthetic construct
TAWRGDRNVV

SEQ ID NO: 129653 - protein, 10 aa, synthetic construct
TAFRGDRNVV

SEQ ID NO: 129654 - protein, 10 aa, synthetic construct
TAKRGDRNVV

SEQ ID NO: 129655 - protein, 10 aa, synthetic construct
TARRGDRNVV

SEQ ID NO: 129656 - protein, 10 aa, synthetic construct
TAHRGDRNVV

SEQ ID NO: 129657 - protein, 10 aa, synthetic construct
TASRGDRNVV

SEQ ID NO: 129658 - protein, 10 aa, synthetic construct
TATRGDRNVV

SEQ ID NO: 129659 - protein, 10 aa, synthetic construct
TAYRGDRNVV

SEQ ID NO: 129660 - protein, 10 aa, synthetic construct
TANRGDRNVV

SEQ ID NO: 129661 - protein, 10 aa, synthetic construct
TAQRGDRNVV

SEQ ID NO: 129662 - protein, 10 aa, synthetic construct
TADRGDRNVV

SEQ ID NO: 129663 - protein, 10 aa, synthetic construct
TAERGDRNVV

SEQ ID NO: 129664 - protein, 10 aa, synthetic construct
TVGRGDRNVV

SEQ ID NO: 129665 - protein, 10 aa, synthetic construct
TVARGDRNVV

SEQ ID NO: 129666 - protein, 10 aa, synthetic construct
TVVRGDRNVV

SEQ ID NO: 129667 - protein, 10 aa, synthetic construct
TVPRGDRNVV

SEQ ID NO: 129668 - protein, 10 aa, synthetic construct
TVLRGDRNVV

SEQ ID NO: 129669 - protein, 10 aa, synthetic construct
TVIRGDRNVV

SEQ ID NO: 129670 - protein, 10 aa, synthetic construct
TVMRGDRNVV

SEQ ID NO: 129671 - protein, 10 aa, synthetic construct
TVWRGDRNVV

SEQ ID NO: 129672 - protein, 10 aa, synthetic construct
TVFRGDRNVV

SEQ ID NO: 129673 - protein, 10 aa, synthetic construct
TVKRGDRNVV

SEQ ID NO: 129674 - protein, 10 aa, synthetic construct
TVRRGDRNVV

SEQ ID NO: 129675 - protein, 10 aa, synthetic construct
TVHRGDRNVV

SEQ ID NO: 129676 - protein, 10 aa, synthetic construct
TVSRGDRNVV

SEQ ID NO: 129677 - protein, 10 aa, synthetic construct
TVTRGDRNVV

SEQ ID NO: 129678 - protein, 10 aa, synthetic construct
TVYRGDRNVV

SEQ ID NO: 129679 - protein, 10 aa, synthetic construct
TVNRGDRNVV

SEQ ID NO: 129680 - protein, 10 aa, synthetic construct
TVQRGDRNVV

SEQ ID NO: 129681 - protein, 10 aa, synthetic construct
TVDRGDRNVV

SEQ ID NO: 129682 - protein, 10 aa, synthetic construct
TVERGDRNVV

SEQ ID NO: 129683 - protein, 10 aa, synthetic construct
TPGRGDRNVV

SEQ ID NO: 129684 - protein, 10 aa, synthetic construct
TPARGDRNVV

SEQ ID NO: 129685 - protein, 10 aa, synthetic construct
TPVRGDRNVV

SEQ ID NO: 129686 - protein, 10 aa, synthetic construct
TPPRGDRNVV

SEQ ID NO: 129687 - protein, 10 aa, synthetic construct
TPLRGDRNVV

SEQ ID NO: 129688 - protein, 10 aa, synthetic construct
TPIRGDRNVV

SEQ ID NO: 129689 - protein, 10 aa, synthetic construct
TPMRGDRNVV

SEQ ID NO: 129690 - protein, 10 aa, synthetic construct
TPWRGDRNVV

SEQ ID NO: 129691 - protein, 10 aa, synthetic construct
TPFRGDRNVV

SEQ ID NO: 129692 - protein, 10 aa, synthetic construct
TPKRGDRNVV

SEQ ID NO: 129693 - protein, 10 aa, synthetic construct
TPRRGDRNVV

SEQ ID NO: 129694 - protein, 10 aa, synthetic construct
TPHRGDRNVV

SEQ ID NO: 129695 - protein, 10 aa, synthetic construct
TPSRGDRNVV

SEQ ID NO: 129696 - protein, 10 aa, synthetic construct
TPTRGDRNVV

SEQ ID NO: 129697 - protein, 10 aa, synthetic construct
TPYRGDRNVV

SEQ ID NO: 129698 - protein, 10 aa, synthetic construct
TPNRGDRNVV

SEQ ID NO: 129699 - protein, 10 aa, synthetic construct
TPQRGDRNVV

SEQ ID NO: 129700 - protein, 10 aa, synthetic construct
TPDRGDRNVV

SEQ ID NO: 129701 - protein, 10 aa, synthetic construct
TPERGDRNVV

SEQ ID NO: 129702 - protein, 10 aa, synthetic construct
TLGRGDRNVV

SEQ ID NO: 129703 - protein, 10 aa, synthetic construct
TLARGDRNVV

SEQ ID NO: 129704 - protein, 10 aa, synthetic construct
TLVRGDRNVV

SEQ ID NO: 129705 - protein, 10 aa, synthetic construct
TLPRGDRNVV

SEQ ID NO: 129706 - protein, 10 aa, synthetic construct
TLLRGDRNVV

SEQ ID NO: 129707 - protein, 10 aa, synthetic construct
TLIRGDRNVV

SEQ ID NO: 129708 - protein, 10 aa, synthetic construct
TLMRGDRNVV

SEQ ID NO: 129709 - protein, 10 aa, synthetic construct
TLWRGDRNVV

SEQ ID NO: 129710 - protein, 10 aa, synthetic construct
TLFRGDRNVV

SEQ ID NO: 129711 - protein, 10 aa, synthetic construct
TLKRGDRNVV

SEQ ID NO: 129712 - protein, 10 aa, synthetic construct
TLRRGDRNVV

SEQ ID NO: 129713 - protein, 10 aa, synthetic construct
TLHRGDRNVV

SEQ ID NO: 129714 - protein, 10 aa, synthetic construct
TLSRGDRNVV

SEQ ID NO: 129715 - protein, 10 aa, synthetic construct
TLTRGDRNVV

SEQ ID NO: 129716 - protein, 10 aa, synthetic construct
TLYRGDRNVV

SEQ ID NO: 129717 - protein, 10 aa, synthetic construct
TLNRGDRNVV

SEQ ID NO: 129718 - protein, 10 aa, synthetic construct
TLQRGDRNVV

SEQ ID NO: 129719 - protein, 10 aa, synthetic construct
TLDRGDRNVV

SEQ ID NO: 129720 - protein, 10 aa, synthetic construct
TLERGDRNVV

SEQ ID NO: 129721 - protein, 10 aa, synthetic construct
TIGRGDRNVV

SEQ ID NO: 129722 - protein, 10 aa, synthetic construct
TIARGDRNVV

SEQ ID NO: 129723 - protein, 10 aa, synthetic construct
TIVRGDRNVV

SEQ ID NO: 129724 - protein, 10 aa, synthetic construct
TIPRGDRNVV

SEQ ID NO: 129725 - protein, 10 aa, synthetic construct
TILRGDRNVV

SEQ ID NO: 129726 - protein, 10 aa, synthetic construct
TIIRGDRNVV

SEQ ID NO: 129727 - protein, 10 aa, synthetic construct
TIMRGDRNVV

SEQ ID NO: 129728 - protein, 10 aa, synthetic construct
TIWRGDRNVV

SEQ ID NO: 129729 - protein, 10 aa, synthetic construct
TIFRGDRNVV

SEQ ID NO: 129730 - protein, 10 aa, synthetic construct
TIKRGDRNVV

SEQ ID NO: 129731 - protein, 10 aa, synthetic construct
TIRRGDRNVV

SEQ ID NO: 129732 - protein, 10 aa, synthetic construct
TIHRGDRNVV

SEQ ID NO: 129733 - protein, 10 aa, synthetic construct
TISRGDRNVV

SEQ ID NO: 129734 - protein, 10 aa, synthetic construct
TITRGDRNVV

SEQ ID NO: 129735 - protein, 10 aa, synthetic construct
TIYRGDRNVV

SEQ ID NO: 129736 - protein, 10 aa, synthetic construct
TINRGDRNVV

SEQ ID NO: 129737 - protein, 10 aa, synthetic construct
TIQRGDRNVV

SEQ ID NO: 129738 - protein, 10 aa, synthetic construct
TIDRGDRNVV

SEQ ID NO: 129739 - protein, 10 aa, synthetic construct
TIERGDRNVV

SEQ ID NO: 129740 - protein, 10 aa, synthetic construct
TMGRGDRNVV

SEQ ID NO: 129741 - protein, 10 aa, synthetic construct
TMARGDRNVV

SEQ ID NO: 129742 - protein, 10 aa, synthetic construct
TMVRGDRNVV

SEQ ID NO: 129743 - protein, 10 aa, synthetic construct
TMPRGDRNVV

SEQ ID NO: 129744 - protein, 10 aa, synthetic construct
TMLRGDRNVV

SEQ ID NO: 129745 - protein, 10 aa, synthetic construct
TMIRGDRNVV

SEQ ID NO: 129746 - protein, 10 aa, synthetic construct
TMMRGDRNVV

SEQ ID NO: 129747 - protein, 10 aa, synthetic construct
TMWRGDRNVV

SEQ ID NO: 129748 - protein, 10 aa, synthetic construct
TMFRGDRNVV

SEQ ID NO: 129749 - protein, 10 aa, synthetic construct
TMKRGDRNVV

SEQ ID NO: 129750 - protein, 10 aa, synthetic construct
TMRRGDRNVV

SEQ ID NO: 129751 - protein, 10 aa, synthetic construct
TMHRGDRNVV

SEQ ID NO: 129752 - protein, 10 aa, synthetic construct
TMSRGDRNVV

SEQ ID NO: 129753 - protein, 10 aa, synthetic construct
TMTRGDRNVV

SEQ ID NO: 129754 - protein, 10 aa, synthetic construct
TMYRGDRNVV

SEQ ID NO: 129755 - protein, 10 aa, synthetic construct
TMNRGDRNVV

SEQ ID NO: 129756 - protein, 10 aa, synthetic construct
TMQRGDRNVV

SEQ ID NO: 129757 - protein, 10 aa, synthetic construct
TMDRGDRNVV

SEQ ID NO: 129758 - protein, 10 aa, synthetic construct
TMERGDRNVV

SEQ ID NO: 129759 - protein, 10 aa, synthetic construct
TWGRGDRNVV

SEQ ID NO: 129760 - protein, 10 aa, synthetic construct
TWARGDRNVV

SEQ ID NO: 129761 - protein, 10 aa, synthetic construct
TWVRGDRNVV

SEQ ID NO: 129762 - protein, 10 aa, synthetic construct
TWPRGDRNVV

SEQ ID NO: 129763 - protein, 10 aa, synthetic construct
TWLRGDRNVV

SEQ ID NO: 129764 - protein, 10 aa, synthetic construct
TWIRGDRNVV

SEQ ID NO: 129765 - protein, 10 aa, synthetic construct
TWMRGDRNVV

SEQ ID NO: 129766 - protein, 10 aa, synthetic construct
TWWRGDRNVV

SEQ ID NO: 129767 - protein, 10 aa, synthetic construct
TWFRGDRNVV

SEQ ID NO: 129768 - protein, 10 aa, synthetic construct
TWKRGDRNVV

SEQ ID NO: 129769 - protein, 10 aa, synthetic construct
TWRRGDRNVV

SEQ ID NO: 129770 - protein, 10 aa, synthetic construct
TWHRGDRNVV

SEQ ID NO: 129771 - protein, 10 aa, synthetic construct
TWSRGDRNVV

SEQ ID NO: 129772 - protein, 10 aa, synthetic construct
TWTRGDRNVV

SEQ ID NO: 129773 - protein, 10 aa, synthetic construct
TWYRGDRNVV

SEQ ID NO: 129774 - protein, 10 aa, synthetic construct
TWNRGDRNVV

SEQ ID NO: 129775 - protein, 10 aa, synthetic construct
TWQRGDRNVV

SEQ ID NO: 129776 - protein, 10 aa, synthetic construct
TWDRGDRNVV

SEQ ID NO: 129777 - protein, 10 aa, synthetic construct
TWERGDRNVV

SEQ ID NO: 129778 - protein, 10 aa, synthetic construct
TFGRGDRNVV

SEQ ID NO: 129779 - protein, 10 aa, synthetic construct
TFARGDRNVV

SEQ ID NO: 129780 - protein, 10 aa, synthetic construct
TFVRGDRNVV

SEQ ID NO: 129781 - protein, 10 aa, synthetic construct
TFPRGDRNVV

SEQ ID NO: 129782 - protein, 10 aa, synthetic construct
TFLRGDRNVV

SEQ ID NO: 129783 - protein, 10 aa, synthetic construct
TFIRGDRNVV

SEQ ID NO: 129784 - protein, 10 aa, synthetic construct
TFMRGDRNVV

SEQ ID NO: 129785 - protein, 10 aa, synthetic construct
TFWRGDRNVV

SEQ ID NO: 129786 - protein, 10 aa, synthetic construct
TFFRGDRNVV

SEQ ID NO: 129787 - protein, 10 aa, synthetic construct
TFKRGDRNVV

SEQ ID NO: 129788 - protein, 10 aa, synthetic construct
TFRRGDRNVV

SEQ ID NO: 129789 - protein, 10 aa, synthetic construct
TFHRGDRNVV

SEQ ID NO: 129790 - protein, 10 aa, synthetic construct
TFSRGDRNVV

SEQ ID NO: 129791 - protein, 10 aa, synthetic construct
TFTRGDRNVV

SEQ ID NO: 129792 - protein, 10 aa, synthetic construct
TFYRGDRNVV

SEQ ID NO: 129793 - protein, 10 aa, synthetic construct
TFNRGDRNVV

SEQ ID NO: 129794 - protein, 10 aa, synthetic construct
TFQRGDRNVV

SEQ ID NO: 129795 - protein, 10 aa, synthetic construct
TFDRGDRNVV

SEQ ID NO: 129796 - protein, 10 aa, synthetic construct
TFERGDRNVV

SEQ ID NO: 129797 - protein, 10 aa, synthetic construct
TKGRGDRNVV

SEQ ID NO: 129798 - protein, 10 aa, synthetic construct
TKARGDRNVV

SEQ ID NO: 129799 - protein, 10 aa, synthetic construct
TKVRGDRNVV

SEQ ID NO: 129800 - protein, 10 aa, synthetic construct
TKPRGDRNVV

SEQ ID NO: 129801 - protein, 10 aa, synthetic construct
TKLRGDRNVV

SEQ ID NO: 129802 - protein, 10 aa, synthetic construct
TKIRGDRNVV

SEQ ID NO: 129803 - protein, 10 aa, synthetic construct
TKMRGDRNVV

SEQ ID NO: 129804 - protein, 10 aa, synthetic construct
TKWRGDRNVV

SEQ ID NO: 129805 - protein, 10 aa, synthetic construct
TKFRGDRNVV

SEQ ID NO: 129806 - protein, 10 aa, synthetic construct
TKKRGDRNVV

SEQ ID NO: 129807 - protein, 10 aa, synthetic construct
TKRRGDRNVV

SEQ ID NO: 129808 - protein, 10 aa, synthetic construct
TKHRGDRNVV

SEQ ID NO: 129809 - protein, 10 aa, synthetic construct
TKSRGDRNVV

SEQ ID NO: 129810 - protein, 10 aa, synthetic construct
TKTRGDRNVV

SEQ ID NO: 129811 - protein, 10 aa, synthetic construct
TKYRGDRNVV

SEQ ID NO: 129812 - protein, 10 aa, synthetic construct
TKNRGDRNVV

SEQ ID NO: 129813 - protein, 10 aa, synthetic construct
TKQRGDRNVV

SEQ ID NO: 129814 - protein, 10 aa, synthetic construct
TKDRGDRNVV

SEQ ID NO: 129815 - protein, 10 aa, synthetic construct
TKERGDRNVV

SEQ ID NO: 129816 - protein, 10 aa, synthetic construct
TRGRGDRNVV

SEQ ID NO: 129817 - protein, 10 aa, synthetic construct
TRARGDRNVV

SEQ ID NO: 129818 - protein, 10 aa, synthetic construct
TRVRGDRNVV

SEQ ID NO: 129819 - protein, 10 aa, synthetic construct
TRPRGDRNVV

SEQ ID NO: 129820 - protein, 10 aa, synthetic construct
TRLRGDRNVV

SEQ ID NO: 129821 - protein, 10 aa, synthetic construct
TRIRGDRNVV

SEQ ID NO: 129822 - protein, 10 aa, synthetic construct
TRMRGDRNVV

SEQ ID NO: 129823 - protein, 10 aa, synthetic construct
TRWRGDRNVV

SEQ ID NO: 129824 - protein, 10 aa, synthetic construct
TRFRGDRNVV

SEQ ID NO: 129825 - protein, 10 aa, synthetic construct
TRKRGDRNVV

SEQ ID NO: 129826 - protein, 10 aa, synthetic construct
TRRRGDRNVV

SEQ ID NO: 129827 - protein, 10 aa, synthetic construct
TRHRGDRNVV

SEQ ID NO: 129828 - protein, 10 aa, synthetic construct
TRSRGDRNVV

SEQ ID NO: 129829 - protein, 10 aa, synthetic construct
TRTRGDRNVV

SEQ ID NO: 129830 - protein, 10 aa, synthetic construct
TRYRGDRNVV

SEQ ID NO: 129831 - protein, 10 aa, synthetic construct
TRNRGDRNVV

SEQ ID NO: 129832 - protein, 10 aa, synthetic construct
TRQRGDRNVV

SEQ ID NO: 129833 - protein, 10 aa, synthetic construct
TRDRGDRNVV

SEQ ID NO: 129834 - protein, 10 aa, synthetic construct
TRERGDRNVV

SEQ ID NO: 129835 - protein, 10 aa, synthetic construct
THGRGDRNVV

SEQ ID NO: 129836 - protein, 10 aa, synthetic construct
THARGDRNVV

SEQ ID NO: 129837 - protein, 10 aa, synthetic construct
THVRGDRNVV

SEQ ID NO: 129838 - protein, 10 aa, synthetic construct
THPRGDRNVV

SEQ ID NO: 129839 - protein, 10 aa, synthetic construct
THLRGDRNVV

SEQ ID NO: 129840 - protein, 10 aa, synthetic construct
THIRGDRNVV

SEQ ID NO: 129841 - protein, 10 aa, synthetic construct
THMRGDRNVV

SEQ ID NO: 129842 - protein, 10 aa, synthetic construct
THWRGDRNVV

SEQ ID NO: 129843 - protein, 10 aa, synthetic construct
THFRGDRNVV

SEQ ID NO: 129844 - protein, 10 aa, synthetic construct
THKRGDRNVV

SEQ ID NO: 129845 - protein, 10 aa, synthetic construct
THRRGDRNVV

SEQ ID NO: 129846 - protein, 10 aa, synthetic construct
THHRGDRNVV

SEQ ID NO: 129847 - protein, 10 aa, synthetic construct
THSRGDRNVV

SEQ ID NO: 129848 - protein, 10 aa, synthetic construct
THTRGDRNVV

SEQ ID NO: 129849 - protein, 10 aa, synthetic construct
THYRGDRNVV

SEQ ID NO: 129850 - protein, 10 aa, synthetic construct
THNRGDRNVV

SEQ ID NO: 129851 - protein, 10 aa, synthetic construct
THQRGDRNVV

SEQ ID NO: 129852 - protein, 10 aa, synthetic construct
THDRGDRNVV

SEQ ID NO: 129853 - protein, 10 aa, synthetic construct
THERGDRNVV

SEQ ID NO: 129854 - protein, 10 aa, synthetic construct
TSGRGDRNVV

SEQ ID NO: 129855 - protein, 10 aa, synthetic construct
TSARGDRNVV

SEQ ID NO: 129856 - protein, 10 aa, synthetic construct
TSVRGDRNVV

SEQ ID NO: 129857 - protein, 10 aa, synthetic construct
TSPRGDRNVV

SEQ ID NO: 129858 - protein, 10 aa, synthetic construct
TSLRGDRNVV

SEQ ID NO: 129859 - protein, 10 aa, synthetic construct
TSIRGDRNVV

SEQ ID NO: 129860 - protein, 10 aa, synthetic construct
TSMRGDRNVV

SEQ ID NO: 129861 - protein, 10 aa, synthetic construct
TSWRGDRNVV

SEQ ID NO: 129862 - protein, 10 aa, synthetic construct
TSFRGDRNVV

SEQ ID NO: 129863 - protein, 10 aa, synthetic construct
TSKRGDRNVV

SEQ ID NO: 129864 - protein, 10 aa, synthetic construct
TSRRGDRNVV

SEQ ID NO: 129865 - protein, 10 aa, synthetic construct
TSHRGDRNVV

SEQ ID NO: 129866 - protein, 10 aa, synthetic construct
TSSRGDRNVV

SEQ ID NO: 129867 - protein, 10 aa, synthetic construct
TSTRGDRNVV

SEQ ID NO: 129868 - protein, 10 aa, synthetic construct
TSYRGDRNVV

SEQ ID NO: 129869 - protein, 10 aa, synthetic construct
TSNRGDRNVV

SEQ ID NO: 129870 - protein, 10 aa, synthetic construct
TSQRGDRNVV

SEQ ID NO: 129871 - protein, 10 aa, synthetic construct
TSDRGDRNVV

SEQ ID NO: 129872 - protein, 10 aa, synthetic construct
TSERGDRNVV

SEQ ID NO: 129873 - protein, 10 aa, synthetic construct
TTGRGDRNVV

SEQ ID NO: 129874 - protein, 10 aa, synthetic construct
TTARGDRNVV

SEQ ID NO: 129875 - protein, 10 aa, synthetic construct
TTVRGDRNVV

SEQ ID NO: 129876 - protein, 10 aa, synthetic construct
TTPRGDRNVV

SEQ ID NO: 129877 - protein, 10 aa, synthetic construct
TTLRGDRNVV

SEQ ID NO: 129878 - protein, 10 aa, synthetic construct
TTIRGDRNVV

SEQ ID NO: 129879 - protein, 10 aa, synthetic construct
TTMRGDRNVV

SEQ ID NO: 129880 - protein, 10 aa, synthetic construct
TTWRGDRNVV

SEQ ID NO: 129881 - protein, 10 aa, synthetic construct
TTFRGDRNVV

SEQ ID NO: 129882 - protein, 10 aa, synthetic construct
TTKRGDRNVV

SEQ ID NO: 129883 - protein, 10 aa, synthetic construct
TTRRGDRNVV

SEQ ID NO: 129884 - protein, 10 aa, synthetic construct
TTHRGDRNVV

SEQ ID NO: 129885 - protein, 10 aa, synthetic construct
TTSRGDRNVV

SEQ ID NO: 129886 - protein, 10 aa, synthetic construct
TTTRGDRNVV

SEQ ID NO: 129887 - protein, 10 aa, synthetic construct
TTYRGDRNVV

SEQ ID NO: 129888 - protein, 10 aa, synthetic construct
TTNRGDRNVV

SEQ ID NO: 129889 - protein, 10 aa, synthetic construct
TTQRGDRNVV

SEQ ID NO: 129890 - protein, 10 aa, synthetic construct
TTDRGDRNVV

SEQ ID NO: 129891 - protein, 10 aa, synthetic construct
TTERGDRNVV

SEQ ID NO: 129892 - protein, 10 aa, synthetic construct
TYGRGDRNVV

SEQ ID NO: 129893 - protein, 10 aa, synthetic construct
TYARGDRNVV

SEQ ID NO: 129894 - protein, 10 aa, synthetic construct
TYVRGDRNVV

SEQ ID NO: 129895 - protein, 10 aa, synthetic construct
TYPRGDRNVV

SEQ ID NO: 129896 - protein, 10 aa, synthetic construct
TYLRGDRNVV

SEQ ID NO: 129897 - protein, 10 aa, synthetic construct
TYIRGDRNVV

SEQ ID NO: 129898 - protein, 10 aa, synthetic construct
TYMRGDRNVV

SEQ ID NO: 129899 - protein, 10 aa, synthetic construct
TYWRGDRNVV

SEQ ID NO: 129900 - protein, 10 aa, synthetic construct
TYFRGDRNVV

SEQ ID NO: 129901 - protein, 10 aa, synthetic construct
TYKRGDRNVV

SEQ ID NO: 129902 - protein, 10 aa, synthetic construct
TYRRGDRNVV

SEQ ID NO: 129903 - protein, 10 aa, synthetic construct
TYHRGDRNVV

SEQ ID NO: 129904 - protein, 10 aa, synthetic construct
TYSRGDRNVV

SEQ ID NO: 129905 - protein, 10 aa, synthetic construct
TYTRGDRNVV

SEQ ID NO: 129906 - protein, 10 aa, synthetic construct
TYYRGDRNVV

SEQ ID NO: 129907 - protein, 10 aa, synthetic construct
TYNRGDRNVV

SEQ ID NO: 129908 - protein, 10 aa, synthetic construct
TYQRGDRNVV

SEQ ID NO: 129909 - protein, 10 aa, synthetic construct
TYDRGDRNVV

SEQ ID NO: 129910 - protein, 10 aa, synthetic construct
TYERGDRNVV

SEQ ID NO: 129911 - protein, 10 aa, synthetic construct
TNGRGDRNVV

SEQ ID NO: 129912 - protein, 10 aa, synthetic construct
TNARGDRNVV

SEQ ID NO: 129913 - protein, 10 aa, synthetic construct
TNVRGDRNVV

SEQ ID NO: 129914 - protein, 10 aa, synthetic construct
TNPRGDRNVV

SEQ ID NO: 129915 - protein, 10 aa, synthetic construct
TNLRGDRNVV

SEQ ID NO: 129916 - protein, 10 aa, synthetic construct
TNIRGDRNVV

SEQ ID NO: 129917 - protein, 10 aa, synthetic construct
TNMRGDRNVV

SEQ ID NO: 129918 - protein, 10 aa, synthetic construct
TNWRGDRNVV

SEQ ID NO: 129919 - protein, 10 aa, synthetic construct
TNFRGDRNVV

SEQ ID NO: 129920 - protein, 10 aa, synthetic construct
TNKRGDRNVV

SEQ ID NO: 129921 - protein, 10 aa, synthetic construct
TNRRGDRNVV

SEQ ID NO: 129922 - protein, 10 aa, synthetic construct
TNHRGDRNVV

SEQ ID NO: 129923 - protein, 10 aa, synthetic construct
TNSRGDRNVV

SEQ ID NO: 129924 - protein, 10 aa, synthetic construct
TNTRGDRNVV

SEQ ID NO: 129925 - protein, 10 aa, synthetic construct
TNYRGDRNVV

SEQ ID NO: 129926 - protein, 10 aa, synthetic construct
TNNRGDRNVV

SEQ ID NO: 129927 - protein, 10 aa, synthetic construct
TNQRGDRNVV

SEQ ID NO: 129928 - protein, 10 aa, synthetic construct
TNDRGDRNVV

SEQ ID NO: 129929 - protein, 10 aa, synthetic construct
TNERGDRNVV

SEQ ID NO: 129930 - protein, 10 aa, synthetic construct
TQGRGDRNVV

SEQ ID NO: 129931 - protein, 10 aa, synthetic construct
TQARGDRNVV

SEQ ID NO: 129932 - protein, 10 aa, synthetic construct
TQVRGDRNVV

SEQ ID NO: 129933 - protein, 10 aa, synthetic construct
TQPRGDRNVV

SEQ ID NO: 129934 - protein, 10 aa, synthetic construct
TQLRGDRNVV

SEQ ID NO: 129935 - protein, 10 aa, synthetic construct
TQIRGDRNVV

SEQ ID NO: 129936 - protein, 10 aa, synthetic construct
TQMRGDRNVV

SEQ ID NO: 129937 - protein, 10 aa, synthetic construct
TQWRGDRNVV

SEQ ID NO: 129938 - protein, 10 aa, synthetic construct
TQFRGDRNVV

SEQ ID NO: 129939 - protein, 10 aa, synthetic construct
TQKRGDRNVV

SEQ ID NO: 129940 - protein, 10 aa, synthetic construct
TQRRGDRNVV

SEQ ID NO: 129941 - protein, 10 aa, synthetic construct
TQHRGDRNVV

SEQ ID NO: 129942 - protein, 10 aa, synthetic construct
TQSRGDRNVV

SEQ ID NO: 129943 - protein, 10 aa, synthetic construct
TQTRGDRNVV

SEQ ID NO: 129944 - protein, 10 aa, synthetic construct
TQYRGDRNVV

SEQ ID NO: 129945 - protein, 10 aa, synthetic construct
TQNRGDRNVV

SEQ ID NO: 129946 - protein, 10 aa, synthetic construct
TQQRGDRNVV

SEQ ID NO: 129947 - protein, 10 aa, synthetic construct
TQDRGDRNVV

SEQ ID NO: 129948 - protein, 10 aa, synthetic construct
TQERGDRNVV

SEQ ID NO: 129949 - protein, 10 aa, synthetic construct
TDGRGDRNVV

SEQ ID NO: 129950 - protein, 10 aa, synthetic construct
TDARGDRNVV

SEQ ID NO: 129951 - protein, 10 aa, synthetic construct
TDVRGDRNVV

SEQ ID NO: 129952 - protein, 10 aa, synthetic construct
TDPRGDRNVV

SEQ ID NO: 129953 - protein, 10 aa, synthetic construct
TDLRGDRNVV

SEQ ID NO: 129954 - protein, 10 aa, synthetic construct
TDIRGDRNVV

SEQ ID NO: 129955 - protein, 10 aa, synthetic construct
TDMRGDRNVV

SEQ ID NO: 129956 - protein, 10 aa, synthetic construct
TDWRGDRNVV

SEQ ID NO: 129957 - protein, 10 aa, synthetic construct
TDFRGDRNVV

SEQ ID NO: 129958 - protein, 10 aa, synthetic construct
TDKRGDRNVV

SEQ ID NO: 129959 - protein, 10 aa, synthetic construct
TDRRGDRNVV

SEQ ID NO: 129960 - protein, 10 aa, synthetic construct
TDHRGDRNVV

SEQ ID NO: 129961 - protein, 10 aa, synthetic construct
TDSRGDRNVV

SEQ ID NO: 129962 - protein, 10 aa, synthetic construct
TDTRGDRNVV

SEQ ID NO: 129963 - protein, 10 aa, synthetic construct
TDYRGDRNVV

SEQ ID NO: 129964 - protein, 10 aa, synthetic construct
TDNRGDRNVV

SEQ ID NO: 129965 - protein, 10 aa, synthetic construct
TDQRGDRNVV

SEQ ID NO: 129966 - protein, 10 aa, synthetic construct
TDDRGDRNVV

SEQ ID NO: 129967 - protein, 10 aa, synthetic construct
TDERGDRNVV

SEQ ID NO: 129968 - protein, 10 aa, synthetic construct
TEGRGDRNVV

SEQ ID NO: 129969 - protein, 10 aa, synthetic construct
TEARGDRNVV

SEQ ID NO: 129970 - protein, 10 aa, synthetic construct
TEVRGDRNVV

SEQ ID NO: 129971 - protein, 10 aa, synthetic construct
TEPRGDRNVV

SEQ ID NO: 129972 - protein, 10 aa, synthetic construct
TELRGDRNVV

SEQ ID NO: 129973 - protein, 10 aa, synthetic construct
TEIRGDRNVV

SEQ ID NO: 129974 - protein, 10 aa, synthetic construct
TEMRGDRNVV

SEQ ID NO: 129975 - protein, 10 aa, synthetic construct
TEWRGDRNVV

SEQ ID NO: 129976 - protein, 10 aa, synthetic construct
TEFRGDRNVV

SEQ ID NO: 129977 - protein, 10 aa, synthetic construct
TEKRGDRNVV

SEQ ID NO: 129978 - protein, 10 aa, synthetic construct
TERRGDRNVV

SEQ ID NO: 129979 - protein, 10 aa, synthetic construct
TEHRGDRNVV

SEQ ID NO: 129980 - protein, 10 aa, synthetic construct
TESRGDRNVV

SEQ ID NO: 129981 - protein, 10 aa, synthetic construct
TETRGDRNVV

SEQ ID NO: 129982 - protein, 10 aa, synthetic construct
TEYRGDRNVV

SEQ ID NO: 129983 - protein, 10 aa, synthetic construct
TENRGDRNVV

SEQ ID NO: 129984 - protein, 10 aa, synthetic construct
TEQRGDRNVV

SEQ ID NO: 129985 - protein, 10 aa, synthetic construct
TEDRGDRNVV

SEQ ID NO: 129986 - protein, 10 aa, synthetic construct
TEERGDRNVV

SEQ ID NO: 129987 - protein, 10 aa, synthetic construct
AGGRGDRNVV

SEQ ID NO: 129988 - protein, 10 aa, synthetic construct
AGARGDRNVV

SEQ ID NO: 129989 - protein, 10 aa, synthetic construct
AGVRGDRNVV

SEQ ID NO: 129990 - protein, 10 aa, synthetic construct
AGPRGDRNVV

SEQ ID NO: 129991 - protein, 10 aa, synthetic construct
AGLRGDRNVV

SEQ ID NO: 129992 - protein, 10 aa, synthetic construct
AGIRGDRNVV

SEQ ID NO: 129993 - protein, 10 aa, synthetic construct
AGMRGDRNVV

SEQ ID NO: 129994 - protein, 10 aa, synthetic construct
AGWRGDRNVV

SEQ ID NO: 129995 - protein, 10 aa, synthetic construct
AGFRGDRNVV

SEQ ID NO: 129996 - protein, 10 aa, synthetic construct
AGKRGDRNVV

SEQ ID NO: 129997 - protein, 10 aa, synthetic construct
AGRRGDRNVV

SEQ ID NO: 129998 - protein, 10 aa, synthetic construct
AGHRGDRNVV

SEQ ID NO: 129999 - protein, 10 aa, synthetic construct
AGSRGDRNVV

SEQ ID NO: 130000 - protein, 10 aa, synthetic construct
AGTRGDRNVV

SEQ ID NO: 130001 - protein, 10 aa, synthetic construct
AGYRGDRNVV

SEQ ID NO: 130002 - protein, 10 aa, synthetic construct
AGNRGDRNVV

SEQ ID NO: 130003 - protein, 10 aa, synthetic construct
AGQRGDRNVV

SEQ ID NO: 130004 - protein, 10 aa, synthetic construct
AGDRGDRNVV

SEQ ID NO: 130005 - protein, 10 aa, synthetic construct
AGERGDRNVV

SEQ ID NO: 130006 - protein, 10 aa, synthetic construct
AAGRGDRNVV

SEQ ID NO: 130007 - protein, 10 aa, synthetic construct
AAARGDRNVV

SEQ ID NO: 130008 - protein, 10 aa, synthetic construct
AAVRGDRNVV

SEQ ID NO: 130009 - protein, 10 aa, synthetic construct
AAPRGDRNVV

SEQ ID NO: 130010 - protein, 10 aa, synthetic construct
AALRGDRNVV

SEQ ID NO: 130011 - protein, 10 aa, synthetic construct
AAIRGDRNVV

SEQ ID NO: 130012 - protein, 10 aa, synthetic construct
AAMRGDRNVV

SEQ ID NO: 130013 - protein, 10 aa, synthetic construct
AAWRGDRNVV

SEQ ID NO: 130014 - protein, 10 aa, synthetic construct
AAFRGDRNVV

SEQ ID NO: 130015 - protein, 10 aa, synthetic construct
AAKRGDRNVV

SEQ ID NO: 130016 - protein, 10 aa, synthetic construct
AARRGDRNVV

SEQ ID NO: 130017 - protein, 10 aa, synthetic construct
AAHRGDRNVV

SEQ ID NO: 130018 - protein, 10 aa, synthetic construct
AASRGDRNVV

SEQ ID NO: 130019 - protein, 10 aa, synthetic construct
AATRGDRNVV

SEQ ID NO: 130020 - protein, 10 aa, synthetic construct
AAYRGDRNVV

SEQ ID NO: 130021 - protein, 10 aa, synthetic construct
AANRGDRNVV

SEQ ID NO: 130022 - protein, 10 aa, synthetic construct
AAQRGDRNVV

SEQ ID NO: 130023 - protein, 10 aa, synthetic construct
AADRGDRNVV

SEQ ID NO: 130024 - protein, 10 aa, synthetic construct
AAERGDRNVV

SEQ ID NO: 130025 - protein, 10 aa, synthetic construct
AVGRGDRNVV

SEQ ID NO: 130026 - protein, 10 aa, synthetic construct
AVARGDRNVV

SEQ ID NO: 130027 - protein, 10 aa, synthetic construct
AVVRGDRNVV

SEQ ID NO: 130028 - protein, 10 aa, synthetic construct
AVPRGDRNVV

SEQ ID NO: 130029 - protein, 10 aa, synthetic construct
AVLRGDRNVV

SEQ ID NO: 130030 - protein, 10 aa, synthetic construct
AVIRGDRNVV

SEQ ID NO: 130031 - protein, 10 aa, synthetic construct
AVMRGDRNVV

SEQ ID NO: 130032 - protein, 10 aa, synthetic construct
AVWRGDRNVV

SEQ ID NO: 130033 - protein, 10 aa, synthetic construct
AVFRGDRNVV

SEQ ID NO: 130034 - protein, 10 aa, synthetic construct
AVKRGDRNVV

SEQ ID NO: 130035 - protein, 10 aa, synthetic construct
AVRRGDRNVV

SEQ ID NO: 130036 - protein, 10 aa, synthetic construct
AVHRGDRNVV

SEQ ID NO: 130037 - protein, 10 aa, synthetic construct
AVSRGDRNVV

SEQ ID NO: 130038 - protein, 10 aa, synthetic construct
AVTRGDRNVV

SEQ ID NO: 130039 - protein, 10 aa, synthetic construct
AVYRGDRNVV

SEQ ID NO: 130040 - protein, 10 aa, synthetic construct
AVNRGDRNVV

SEQ ID NO: 130041 - protein, 10 aa, synthetic construct
AVQRGDRNVV

SEQ ID NO: 130042 - protein, 10 aa, synthetic construct
AVDRGDRNVV

SEQ ID NO: 130043 - protein, 10 aa, synthetic construct
AVERGDRNVV

SEQ ID NO: 130044 - protein, 10 aa, synthetic construct
APGRGDRNVV

SEQ ID NO: 130045 - protein, 10 aa, synthetic construct
APARGDRNVV

SEQ ID NO: 130046 - protein, 10 aa, synthetic construct
APVRGDRNVV

SEQ ID NO: 130047 - protein, 10 aa, synthetic construct
APPRGDRNVV

SEQ ID NO: 130048 - protein, 10 aa, synthetic construct
APLRGDRNVV

SEQ ID NO: 130049 - protein, 10 aa, synthetic construct
APIRGDRNVV

SEQ ID NO: 130050 - protein, 10 aa, synthetic construct
APMRGDRNVV

SEQ ID NO: 130051 - protein, 10 aa, synthetic construct
APWRGDRNVV

SEQ ID NO: 130052 - protein, 10 aa, synthetic construct
APFRGDRNVV

SEQ ID NO: 130053 - protein, 10 aa, synthetic construct
APKRGDRNVV

SEQ ID NO: 130054 - protein, 10 aa, synthetic construct
APRRGDRNVV

SEQ ID NO: 130055 - protein, 10 aa, synthetic construct
APHRGDRNVV

SEQ ID NO: 130056 - protein, 10 aa, synthetic construct
APSRGDRNVV

SEQ ID NO: 130057 - protein, 10 aa, synthetic construct
APTRGDRNVV

SEQ ID NO: 130058 - protein, 10 aa, synthetic construct
APYRGDRNVV

SEQ ID NO: 130059 - protein, 10 aa, synthetic construct
APNRGDRNVV

SEQ ID NO: 130060 - protein, 10 aa, synthetic construct
APQRGDRNVV

SEQ ID NO: 130061 - protein, 10 aa, synthetic construct
APDRGDRNVV

SEQ ID NO: 130062 - protein, 10 aa, synthetic construct
APERGDRNVV

SEQ ID NO: 130063 - protein, 10 aa, synthetic construct
ALGRGDRNVV

SEQ ID NO: 130064 - protein, 10 aa, synthetic construct
ALARGDRNVV

SEQ ID NO: 130065 - protein, 10 aa, synthetic construct
ALVRGDRNVV

SEQ ID NO: 130066 - protein, 10 aa, synthetic construct
ALPRGDRNVV

SEQ ID NO: 130067 - protein, 10 aa, synthetic construct
ALLRGDRNVV

SEQ ID NO: 130068 - protein, 10 aa, synthetic construct
ALIRGDRNVV

SEQ ID NO: 130069 - protein, 10 aa, synthetic construct
ALMRGDRNVV

SEQ ID NO: 130070 - protein, 10 aa, synthetic construct
ALWRGDRNVV

SEQ ID NO: 130071 - protein, 10 aa, synthetic construct
ALFRGDRNVV

SEQ ID NO: 130072 - protein, 10 aa, synthetic construct
ALKRGDRNVV

SEQ ID NO: 130073 - protein, 10 aa, synthetic construct
ALRRGDRNVV

SEQ ID NO: 130074 - protein, 10 aa, synthetic construct
ALHRGDRNVV

SEQ ID NO: 130075 - protein, 10 aa, synthetic construct
ALSRGDRNVV

SEQ ID NO: 130076 - protein, 10 aa, synthetic construct
ALTRGDRNVV

SEQ ID NO: 130077 - protein, 10 aa, synthetic construct
ALYRGDRNVV

SEQ ID NO: 130078 - protein, 10 aa, synthetic construct
ALNRGDRNVV

SEQ ID NO: 130079 - protein, 10 aa, synthetic construct
ALQRGDRNVV

SEQ ID NO: 130080 - protein, 10 aa, synthetic construct
ALDRGDRNVV

SEQ ID NO: 130081 - protein, 10 aa, synthetic construct
ALERGDRNVV

SEQ ID NO: 130082 - protein, 10 aa, synthetic construct
AIGRGDRNVV

SEQ ID NO: 130083 - protein, 10 aa, synthetic construct
AIARGDRNVV

SEQ ID NO: 130084 - protein, 10 aa, synthetic construct
AIVRGDRNVV

SEQ ID NO: 130085 - protein, 10 aa, synthetic construct
AIPRGDRNVV

SEQ ID NO: 130086 - protein, 10 aa, synthetic construct
AILRGDRNVV

SEQ ID NO: 130087 - protein, 10 aa, synthetic construct
AIIRGDRNVV

SEQ ID NO: 130088 - protein, 10 aa, synthetic construct
AIMRGDRNVV

SEQ ID NO: 130089 - protein, 10 aa, synthetic construct
AIWRGDRNVV

SEQ ID NO: 130090 - protein, 10 aa, synthetic construct
AIFRGDRNVV

SEQ ID NO: 130091 - protein, 10 aa, synthetic construct
AIKRGDRNVV

SEQ ID NO: 130092 - protein, 10 aa, synthetic construct
AIRRGDRNVV

SEQ ID NO: 130093 - protein, 10 aa, synthetic construct
AIHRGDRNVV

SEQ ID NO: 130094 - protein, 10 aa, synthetic construct
AISRGDRNVV

SEQ ID NO: 130095 - protein, 10 aa, synthetic construct
AITRGDRNVV

SEQ ID NO: 130096 - protein, 10 aa, synthetic construct
AIYRGDRNVV

SEQ ID NO: 130097 - protein, 10 aa, synthetic construct
AINRGDRNVV

SEQ ID NO: 130098 - protein, 10 aa, synthetic construct
AIQRGDRNVV

SEQ ID NO: 130099 - protein, 10 aa, synthetic construct
AIDRGDRNVV

SEQ ID NO: 130100 - protein, 10 aa, synthetic construct
AIERGDRNVV

SEQ ID NO: 130101 - protein, 10 aa, synthetic construct
AMGRGDRNVV

SEQ ID NO: 130102 - protein, 10 aa, synthetic construct
AMARGDRNVV

SEQ ID NO: 130103 - protein, 10 aa, synthetic construct
AMVRGDRNVV

SEQ ID NO: 130104 - protein, 10 aa, synthetic construct
AMPRGDRNVV

SEQ ID NO: 130105 - protein, 10 aa, synthetic construct
AMLRGDRNVV

SEQ ID NO: 130106 - protein, 10 aa, synthetic construct
AMIRGDRNVV

SEQ ID NO: 130107 - protein, 10 aa, synthetic construct
AMMRGDRNVV

SEQ ID NO: 130108 - protein, 10 aa, synthetic construct
AMWRGDRNVV

SEQ ID NO: 130109 - protein, 10 aa, synthetic construct
AMFRGDRNVV

SEQ ID NO: 130110 - protein, 10 aa, synthetic construct
AMKRGDRNVV

SEQ ID NO: 130111 - protein, 10 aa, synthetic construct
AMRRGDRNVV

SEQ ID NO: 130112 - protein, 10 aa, synthetic construct
AMHRGDRNVV

SEQ ID NO: 130113 - protein, 10 aa, synthetic construct
AMSRGDRNVV

SEQ ID NO: 130114 - protein, 10 aa, synthetic construct
AMTRGDRNVV

SEQ ID NO: 130115 - protein, 10 aa, synthetic construct
AMYRGDRNVV

SEQ ID NO: 130116 - protein, 10 aa, synthetic construct
AMNRGDRNVV

SEQ ID NO: 130117 - protein, 10 aa, synthetic construct
AMQRGDRNVV

SEQ ID NO: 130118 - protein, 10 aa, synthetic construct
AMDRGDRNVV

SEQ ID NO: 130119 - protein, 10 aa, synthetic construct
AMERGDRNVV

SEQ ID NO: 130120 - protein, 10 aa, synthetic construct
AWGRGDRNVV

SEQ ID NO: 130121 - protein, 10 aa, synthetic construct
AWARGDRNVV

SEQ ID NO: 130122 - protein, 10 aa, synthetic construct
AWVRGDRNVV

SEQ ID NO: 130123 - protein, 10 aa, synthetic construct
AWPRGDRNVV

SEQ ID NO: 130124 - protein, 10 aa, synthetic construct
AWLRGDRNVV

SEQ ID NO: 130125 - protein, 10 aa, synthetic construct
AWIRGDRNVV

SEQ ID NO: 130126 - protein, 10 aa, synthetic construct
AWMRGDRNVV

SEQ ID NO: 130127 - protein, 10 aa, synthetic construct
AWWRGDRNVV

SEQ ID NO: 130128 - protein, 10 aa, synthetic construct
AWFRGDRNVV

SEQ ID NO: 130129 - protein, 10 aa, synthetic construct
AWKRGDRNVV

SEQ ID NO: 130130 - protein, 10 aa, synthetic construct
AWRRGDRNVV

SEQ ID NO: 130131 - protein, 10 aa, synthetic construct
AWHRGDRNVV

SEQ ID NO: 130132 - protein, 10 aa, synthetic construct
AWSRGDRNVV

SEQ ID NO: 130133 - protein, 10 aa, synthetic construct
AWTRGDRNVV

SEQ ID NO: 130134 - protein, 10 aa, synthetic construct
AWYRGDRNVV

SEQ ID NO: 130135 - protein, 10 aa, synthetic construct
AWNRGDRNVV

SEQ ID NO: 130136 - protein, 10 aa, synthetic construct
AWQRGDRNVV

SEQ ID NO: 130137 - protein, 10 aa, synthetic construct
AWDRGDRNVV

SEQ ID NO: 130138 - protein, 10 aa, synthetic construct
AWERGDRNVV

SEQ ID NO: 130139 - protein, 10 aa, synthetic construct
AFGRGDRNVV

SEQ ID NO: 130140 - protein, 10 aa, synthetic construct
AFARGDRNVV

SEQ ID NO: 130141 - protein, 10 aa, synthetic construct
AFVRGDRNVV

SEQ ID NO: 130142 - protein, 10 aa, synthetic construct
AFPRGDRNVV

SEQ ID NO: 130143 - protein, 10 aa, synthetic construct
AFLRGDRNVV

SEQ ID NO: 130144 - protein, 10 aa, synthetic construct
AFIRGDRNVV

SEQ ID NO: 130145 - protein, 10 aa, synthetic construct
AFMRGDRNVV

SEQ ID NO: 130146 - protein, 10 aa, synthetic construct
AFWRGDRNVV

SEQ ID NO: 130147 - protein, 10 aa, synthetic construct
AFFRGDRNVV

SEQ ID NO: 130148 - protein, 10 aa, synthetic construct
AFKRGDRNVV

SEQ ID NO: 130149 - protein, 10 aa, synthetic construct
AFRRGDRNVV

SEQ ID NO: 130150 - protein, 10 aa, synthetic construct
AFHRGDRNVV

SEQ ID NO: 130151 - protein, 10 aa, synthetic construct
AFSRGDRNVV

SEQ ID NO: 130152 - protein, 10 aa, synthetic construct
AFTRGDRNVV

SEQ ID NO: 130153 - protein, 10 aa, synthetic construct
AFYRGDRNVV

SEQ ID NO: 130154 - protein, 10 aa, synthetic construct
AFNRGDRNVV

SEQ ID NO: 130155 - protein, 10 aa, synthetic construct
AFQRGDRNVV

SEQ ID NO: 130156 - protein, 10 aa, synthetic construct
AFDRGDRNVV

SEQ ID NO: 130157 - protein, 10 aa, synthetic construct
AFERGDRNVV

SEQ ID NO: 130158 - protein, 10 aa, synthetic construct
AKGRGDRNVV

SEQ ID NO: 130159 - protein, 10 aa, synthetic construct
AKARGDRNVV

SEQ ID NO: 130160 - protein, 10 aa, synthetic construct
AKVRGDRNVV

SEQ ID NO: 130161 - protein, 10 aa, synthetic construct
AKPRGDRNVV

SEQ ID NO: 130162 - protein, 10 aa, synthetic construct
AKLRGDRNVV

SEQ ID NO: 130163 - protein, 10 aa, synthetic construct
AKIRGDRNVV

SEQ ID NO: 130164 - protein, 10 aa, synthetic construct
AKMRGDRNVV

SEQ ID NO: 130165 - protein, 10 aa, synthetic construct
AKWRGDRNVV

SEQ ID NO: 130166 - protein, 10 aa, synthetic construct
AKFRGDRNVV

SEQ ID NO: 130167 - protein, 10 aa, synthetic construct
AKKRGDRNVV

SEQ ID NO: 130168 - protein, 10 aa, synthetic construct
AKRRGDRNVV

SEQ ID NO: 130169 - protein, 10 aa, synthetic construct
AKHRGDRNVV

SEQ ID NO: 130170 - protein, 10 aa, synthetic construct
AKSRGDRNVV

SEQ ID NO: 130171 - protein, 10 aa, synthetic construct
AKTRGDRNVV

SEQ ID NO: 130172 - protein, 10 aa, synthetic construct
AKYRGDRNVV

SEQ ID NO: 130173 - protein, 10 aa, synthetic construct
AKNRGDRNVV

SEQ ID NO: 130174 - protein, 10 aa, synthetic construct
AKQRGDRNVV

SEQ ID NO: 130175 - protein, 10 aa, synthetic construct
AKDRGDRNVV

SEQ ID NO: 130176 - protein, 10 aa, synthetic construct
AKERGDRNVV

SEQ ID NO: 130177 - protein, 10 aa, synthetic construct
ARGRGDRNVV

SEQ ID NO: 130178 - protein, 10 aa, synthetic construct
ARARGDRNVV

SEQ ID NO: 130179 - protein, 10 aa, synthetic construct
ARVRGDRNVV

SEQ ID NO: 130180 - protein, 10 aa, synthetic construct
ARPRGDRNVV

SEQ ID NO: 130181 - protein, 10 aa, synthetic construct
ARLRGDRNVV

SEQ ID NO: 130182 - protein, 10 aa, synthetic construct
ARIRGDRNVV

SEQ ID NO: 130183 - protein, 10 aa, synthetic construct
ARMRGDRNVV

SEQ ID NO: 130184 - protein, 10 aa, synthetic construct
ARWRGDRNVV

SEQ ID NO: 130185 - protein, 10 aa, synthetic construct
ARFRGDRNVV

SEQ ID NO: 130186 - protein, 10 aa, synthetic construct
ARKRGDRNVV

SEQ ID NO: 130187 - protein, 10 aa, synthetic construct
ARRRGDRNVV

SEQ ID NO: 130188 - protein, 10 aa, synthetic construct
ARHRGDRNVV

SEQ ID NO: 130189 - protein, 10 aa, synthetic construct
ARSRGDRNVV

SEQ ID NO: 130190 - protein, 10 aa, synthetic construct
ARTRGDRNVV

SEQ ID NO: 130191 - protein, 10 aa, synthetic construct
ARYRGDRNVV

SEQ ID NO: 130192 - protein, 10 aa, synthetic construct
ARNRGDRNVV

SEQ ID NO: 130193 - protein, 10 aa, synthetic construct
ARQRGDRNVV

SEQ ID NO: 130194 - protein, 10 aa, synthetic construct
ARDRGDRNVV

SEQ ID NO: 130195 - protein, 10 aa, synthetic construct
ARERGDRNVV

SEQ ID NO: 130196 - protein, 10 aa, synthetic construct
AHGRGDRNVV

SEQ ID NO: 130197 - protein, 10 aa, synthetic construct
AHARGDRNVV

SEQ ID NO: 130198 - protein, 10 aa, synthetic construct
AHVRGDRNVV

SEQ ID NO: 130199 - protein, 10 aa, synthetic construct
AHPRGDRNVV

SEQ ID NO: 130200 - protein, 10 aa, synthetic construct
AHLRGDRNVV

SEQ ID NO: 130201 - protein, 10 aa, synthetic construct
AHIRGDRNVV

SEQ ID NO: 130202 - protein, 10 aa, synthetic construct
AHMRGDRNVV

SEQ ID NO: 130203 - protein, 10 aa, synthetic construct
AHWRGDRNVV

SEQ ID NO: 130204 - protein, 10 aa, synthetic construct
AHFRGDRNVV

SEQ ID NO: 130205 - protein, 10 aa, synthetic construct
AHKRGDRNVV

SEQ ID NO: 130206 - protein, 10 aa, synthetic construct
AHRRGDRNVV

SEQ ID NO: 130207 - protein, 10 aa, synthetic construct
AHHRGDRNVV

SEQ ID NO: 130208 - protein, 10 aa, synthetic construct
AHSRGDRNVV

SEQ ID NO: 130209 - protein, 10 aa, synthetic construct
AHTRGDRNVV

SEQ ID NO: 130210 - protein, 10 aa, synthetic construct
AHYRGDRNVV

SEQ ID NO: 130211 - protein, 10 aa, synthetic construct
AHNRGDRNVV

SEQ ID NO: 130212 - protein, 10 aa, synthetic construct
AHQRGDRNVV

SEQ ID NO: 130213 - protein, 10 aa, synthetic construct
AHDRGDRNVV

SEQ ID NO: 130214 - protein, 10 aa, synthetic construct
AHERGDRNVV

SEQ ID NO: 130215 - protein, 10 aa, synthetic construct
ASGRGDRNVV

SEQ ID NO: 130216 - protein, 10 aa, synthetic construct
ASARGDRNVV

SEQ ID NO: 130217 - protein, 10 aa, synthetic construct
ASVRGDRNVV

SEQ ID NO: 130218 - protein, 10 aa, synthetic construct
ASPRGDRNVV

SEQ ID NO: 130219 - protein, 10 aa, synthetic construct
ASLRGDRNVV

SEQ ID NO: 130220 - protein, 10 aa, synthetic construct
ASIRGDRNVV

SEQ ID NO: 130221 - protein, 10 aa, synthetic construct
ASMRGDRNVV

SEQ ID NO: 130222 - protein, 10 aa, synthetic construct
ASWRGDRNVV

SEQ ID NO: 130223 - protein, 10 aa, synthetic construct
ASFRGDRNVV

SEQ ID NO: 130224 - protein, 10 aa, synthetic construct
ASKRGDRNVV

SEQ ID NO: 130225 - protein, 10 aa, synthetic construct
ASRRGDRNVV

SEQ ID NO: 130226 - protein, 10 aa, synthetic construct
ASHRGDRNVV

SEQ ID NO: 130227 - protein, 10 aa, synthetic construct
ASSRGDRNVV

SEQ ID NO: 130228 - protein, 10 aa, synthetic construct
ASTRGDRNVV

SEQ ID NO: 130229 - protein, 10 aa, synthetic construct
ASYRGDRNVV

SEQ ID NO: 130230 - protein, 10 aa, synthetic construct
ASNRGDRNVV

SEQ ID NO: 130231 - protein, 10 aa, synthetic construct
ASQRGDRNVV

SEQ ID NO: 130232 - protein, 10 aa, synthetic construct
ASDRGDRNVV

SEQ ID NO: 130233 - protein, 10 aa, synthetic construct
ASERGDRNVV

SEQ ID NO: 130234 - protein, 10 aa, synthetic construct
ATGRGDRNVV

SEQ ID NO: 130235 - protein, 10 aa, synthetic construct
ATARGDRNVV

SEQ ID NO: 130236 - protein, 10 aa, synthetic construct
ATVRGDRNVV

SEQ ID NO: 130237 - protein, 10 aa, synthetic construct
ATPRGDRNVV

SEQ ID NO: 130238 - protein, 10 aa, synthetic construct
ATLRGDRNVV

SEQ ID NO: 130239 - protein, 10 aa, synthetic construct
ATIRGDRNVV

SEQ ID NO: 130240 - protein, 10 aa, synthetic construct
ATMRGDRNVV

SEQ ID NO: 130241 - protein, 10 aa, synthetic construct
ATWRGDRNVV

SEQ ID NO: 130242 - protein, 10 aa, synthetic construct
ATFRGDRNVV

SEQ ID NO: 130243 - protein, 10 aa, synthetic construct
ATKRGDRNVV

SEQ ID NO: 130244 - protein, 10 aa, synthetic construct
ATRRGDRNVV

SEQ ID NO: 130245 - protein, 10 aa, synthetic construct
ATHRGDRNVV

SEQ ID NO: 130246 - protein, 10 aa, synthetic construct
ATSRGDRNVV

SEQ ID NO: 130247 - protein, 10 aa, synthetic construct
ATTRGDRNVV

SEQ ID NO: 130248 - protein, 10 aa, synthetic construct
ATYRGDRNVV

SEQ ID NO: 130249 - protein, 10 aa, synthetic construct
ATNRGDRNVV

SEQ ID NO: 130250 - protein, 10 aa, synthetic construct
ATQRGDRNVV

SEQ ID NO: 130251 - protein, 10 aa, synthetic construct
ATDRGDRNVV

SEQ ID NO: 130252 - protein, 10 aa, synthetic construct
ATERGDRNVV

SEQ ID NO: 130253 - protein, 10 aa, synthetic construct
AYGRGDRNVV

SEQ ID NO: 130254 - protein, 10 aa, synthetic construct
AYARGDRNVV

SEQ ID NO: 130255 - protein, 10 aa, synthetic construct
AYVRGDRNVV

SEQ ID NO: 130256 - protein, 10 aa, synthetic construct
AYPRGDRNVV

SEQ ID NO: 130257 - protein, 10 aa, synthetic construct
AYLRGDRNVV

SEQ ID NO: 130258 - protein, 10 aa, synthetic construct
AYIRGDRNVV

SEQ ID NO: 130259 - protein, 10 aa, synthetic construct
AYMRGDRNVV

SEQ ID NO: 130260 - protein, 10 aa, synthetic construct
AYWRGDRNVV

SEQ ID NO: 130261 - protein, 10 aa, synthetic construct
AYFRGDRNVV

SEQ ID NO: 130262 - protein, 10 aa, synthetic construct
AYKRGDRNVV

SEQ ID NO: 130263 - protein, 10 aa, synthetic construct
AYRRGDRNVV

SEQ ID NO: 130264 - protein, 10 aa, synthetic construct
AYHRGDRNVV

SEQ ID NO: 130265 - protein, 10 aa, synthetic construct
AYSRGDRNVV

SEQ ID NO: 130266 - protein, 10 aa, synthetic construct
AYTRGDRNVV

SEQ ID NO: 130267 - protein, 10 aa, synthetic construct
AYYRGDRNVV

SEQ ID NO: 130268 - protein, 10 aa, synthetic construct
AYNRGDRNVV

SEQ ID NO: 130269 - protein, 10 aa, synthetic construct
AYQRGDRNVV

SEQ ID NO: 130270 - protein, 10 aa, synthetic construct
AYDRGDRNVV

SEQ ID NO: 130271 - protein, 10 aa, synthetic construct
AYERGDRNVV

SEQ ID NO: 130272 - protein, 10 aa, synthetic construct
ANGRGDRNVV

SEQ ID NO: 130273 - protein, 10 aa, synthetic construct
ANARGDRNVV

SEQ ID NO: 130274 - protein, 10 aa, synthetic construct
ANVRGDRNVV

SEQ ID NO: 130275 - protein, 10 aa, synthetic construct
ANPRGDRNVV

SEQ ID NO: 130276 - protein, 10 aa, synthetic construct
ANLRGDRNVV

SEQ ID NO: 130277 - protein, 10 aa, synthetic construct
ANIRGDRNVV

SEQ ID NO: 130278 - protein, 10 aa, synthetic construct
ANMRGDRNVV

SEQ ID NO: 130279 - protein, 10 aa, synthetic construct
ANWRGDRNVV

SEQ ID NO: 130280 - protein, 10 aa, synthetic construct
ANFRGDRNVV

SEQ ID NO: 130281 - protein, 10 aa, synthetic construct
ANKRGDRNVV

SEQ ID NO: 130282 - protein, 10 aa, synthetic construct
ANRRGDRNVV

SEQ ID NO: 130283 - protein, 10 aa, synthetic construct
ANHRGDRNVV

SEQ ID NO: 130284 - protein, 10 aa, synthetic construct
ANSRGDRNVV

SEQ ID NO: 130285 - protein, 10 aa, synthetic construct
ANTRGDRNVV

SEQ ID NO: 130286 - protein, 10 aa, synthetic construct
ANYRGDRNVV

SEQ ID NO: 130287 - protein, 10 aa, synthetic construct
ANNRGDRNVV

SEQ ID NO: 130288 - protein, 10 aa, synthetic construct
ANQRGDRNVV

SEQ ID NO: 130289 - protein, 10 aa, synthetic construct
ANDRGDRNVV

SEQ ID NO: 130290 - protein, 10 aa, synthetic construct
ANERGDRNVV

SEQ ID NO: 130291 - protein, 10 aa, synthetic construct
AQGRGDRNVV

SEQ ID NO: 130292 - protein, 10 aa, synthetic construct
AQARGDRNVV

SEQ ID NO: 130293 - protein, 10 aa, synthetic construct
AQVRGDRNVV

SEQ ID NO: 130294 - protein, 10 aa, synthetic construct
AQPRGDRNVV

SEQ ID NO: 130295 - protein, 10 aa, synthetic construct
AQLRGDRNVV

SEQ ID NO: 130296 - protein, 10 aa, synthetic construct
AQIRGDRNVV

SEQ ID NO: 130297 - protein, 10 aa, synthetic construct
AQMRGDRNVV

SEQ ID NO: 130298 - protein, 10 aa, synthetic construct
AQWRGDRNVV

SEQ ID NO: 130299 - protein, 10 aa, synthetic construct
AQFRGDRNVV

SEQ ID NO: 130300 - protein, 10 aa, synthetic construct
AQKRGDRNVV

SEQ ID NO: 130301 - protein, 10 aa, synthetic construct
AQRRGDRNVV

SEQ ID NO: 130302 - protein, 10 aa, synthetic construct
AQHRGDRNVV

SEQ ID NO: 130303 - protein, 10 aa, synthetic construct
AQSRGDRNVV

SEQ ID NO: 130304 - protein, 10 aa, synthetic construct
AQTRGDRNVV

SEQ ID NO: 130305 - protein, 10 aa, synthetic construct
AQYRGDRNVV

SEQ ID NO: 130306 - protein, 10 aa, synthetic construct
AQNRGDRNVV

SEQ ID NO: 130307 - protein, 10 aa, synthetic construct
AQQRGDRNVV

SEQ ID NO: 130308 - protein, 10 aa, synthetic construct
AQDRGDRNVV

SEQ ID NO: 130309 - protein, 10 aa, synthetic construct
AQERGDRNVV

SEQ ID NO: 130310 - protein, 10 aa, synthetic construct
ADGRGDRNVV

SEQ ID NO: 130311 - protein, 10 aa, synthetic construct
ADARGDRNVV

SEQ ID NO: 130312 - protein, 10 aa, synthetic construct
ADVRGDRNVV

SEQ ID NO: 130313 - protein, 10 aa, synthetic construct
ADPRGDRNVV

SEQ ID NO: 130314 - protein, 10 aa, synthetic construct
ADLRGDRNVV

SEQ ID NO: 130315 - protein, 10 aa, synthetic construct
ADIRGDRNVV

SEQ ID NO: 130316 - protein, 10 aa, synthetic construct
ADMRGDRNVV

SEQ ID NO: 130317 - protein, 10 aa, synthetic construct
ADWRGDRNVV

SEQ ID NO: 130318 - protein, 10 aa, synthetic construct
ADFRGDRNVV

SEQ ID NO: 130319 - protein, 10 aa, synthetic construct
ADKRGDRNVV

SEQ ID NO: 130320 - protein, 10 aa, synthetic construct
ADRRGDRNVV

SEQ ID NO: 130321 - protein, 10 aa, synthetic construct
ADHRGDRNVV

SEQ ID NO: 130322 - protein, 10 aa, synthetic construct
ADSRGDRNVV

SEQ ID NO: 130323 - protein, 10 aa, synthetic construct
ADTRGDRNVV

SEQ ID NO: 130324 - protein, 10 aa, synthetic construct
ADYRGDRNVV

SEQ ID NO: 130325 - protein, 10 aa, synthetic construct
ADNRGDRNVV

SEQ ID NO: 130326 - protein, 10 aa, synthetic construct
ADQRGDRNVV

SEQ ID NO: 130327 - protein, 10 aa, synthetic construct
ADDRGDRNVV

SEQ ID NO: 130328 - protein, 10 aa, synthetic construct
ADERGDRNVV

SEQ ID NO: 130329 - protein, 10 aa, synthetic construct
AEGRGDRNVV

SEQ ID NO: 130330 - protein, 10 aa, synthetic construct
AEARGDRNVV

SEQ ID NO: 130331 - protein, 10 aa, synthetic construct
AEVRGDRNVV

SEQ ID NO: 130332 - protein, 10 aa, synthetic construct
AEPRGDRNVV

SEQ ID NO: 130333 - protein, 10 aa, synthetic construct
AELRGDRNVV

SEQ ID NO: 130334 - protein, 10 aa, synthetic construct
AEIRGDRNVV

SEQ ID NO: 130335 - protein, 10 aa, synthetic construct
AEMRGDRNVV

SEQ ID NO: 130336 - protein, 10 aa, synthetic construct
AEWRGDRNVV

SEQ ID NO: 130337 - protein, 10 aa, synthetic construct
AEFRGDRNVV

SEQ ID NO: 130338 - protein, 10 aa, synthetic construct
AEKRGDRNVV

SEQ ID NO: 130339 - protein, 10 aa, synthetic construct
AERRGDRNVV

SEQ ID NO: 130340 - protein, 10 aa, synthetic construct
AEHRGDRNVV

SEQ ID NO: 130341 - protein, 10 aa, synthetic construct
AESRGDRNVV

SEQ ID NO: 130342 - protein, 10 aa, synthetic construct
AETRGDRNVV

SEQ ID NO: 130343 - protein, 10 aa, synthetic construct
AEYRGDRNVV

SEQ ID NO: 130344 - protein, 10 aa, synthetic construct
AENRGDRNVV

SEQ ID NO: 130345 - protein, 10 aa, synthetic construct
AEQRGDRNVV

SEQ ID NO: 130346 - protein, 10 aa, synthetic construct
AEDRGDRNVV

SEQ ID NO: 130347 - protein, 10 aa, synthetic construct
AEERGDRNVV

SEQ ID NO: 130348 - protein, 10 aa, synthetic construct
EGGRGDRNVV

SEQ ID NO: 130349 - protein, 10 aa, synthetic construct
EGARGDRNVV

SEQ ID NO: 130350 - protein, 10 aa, synthetic construct
EGVRGDRNVV

SEQ ID NO: 130351 - protein, 10 aa, synthetic construct
EGPRGDRNVV

SEQ ID NO: 130352 - protein, 10 aa, synthetic construct
EGLRGDRNVV

SEQ ID NO: 130353 - protein, 10 aa, synthetic construct
EGIRGDRNVV

SEQ ID NO: 130354 - protein, 10 aa, synthetic construct
EGMRGDRNVV

SEQ ID NO: 130355 - protein, 10 aa, synthetic construct
EGWRGDRNVV

SEQ ID NO: 130356 - protein, 10 aa, synthetic construct
EGFRGDRNVV

SEQ ID NO: 130357 - protein, 10 aa, synthetic construct
EGKRGDRNVV

SEQ ID NO: 130358 - protein, 10 aa, synthetic construct
EGRRGDRNVV

SEQ ID NO: 130359 - protein, 10 aa, synthetic construct
EGHRGDRNVV

SEQ ID NO: 130360 - protein, 10 aa, synthetic construct
EGSRGDRNVV

SEQ ID NO: 130361 - protein, 10 aa, synthetic construct
EGTRGDRNVV

SEQ ID NO: 130362 - protein, 10 aa, synthetic construct
EGYRGDRNVV

SEQ ID NO: 130363 - protein, 10 aa, synthetic construct
EGNRGDRNVV

SEQ ID NO: 130364 - protein, 10 aa, synthetic construct
EGQRGDRNVV

SEQ ID NO: 130365 - protein, 10 aa, synthetic construct
EGDRGDRNVV

SEQ ID NO: 130366 - protein, 10 aa, synthetic construct
EGERGDRNVV

SEQ ID NO: 130367 - protein, 10 aa, synthetic construct
EAGRGDRNVV

SEQ ID NO: 130368 - protein, 10 aa, synthetic construct
EAARGDRNVV

SEQ ID NO: 130369 - protein, 10 aa, synthetic construct
EAVRGDRNVV

SEQ ID NO: 130370 - protein, 10 aa, synthetic construct
EAPRGDRNVV

SEQ ID NO: 130371 - protein, 10 aa, synthetic construct
EALRGDRNVV

SEQ ID NO: 130372 - protein, 10 aa, synthetic construct
EAIRGDRNVV

SEQ ID NO: 130373 - protein, 10 aa, synthetic construct
EAMRGDRNVV

SEQ ID NO: 130374 - protein, 10 aa, synthetic construct
EAWRGDRNVV

SEQ ID NO: 130375 - protein, 10 aa, synthetic construct
EAFRGDRNVV

SEQ ID NO: 130376 - protein, 10 aa, synthetic construct
EAKRGDRNVV

SEQ ID NO: 130377 - protein, 10 aa, synthetic construct
EARRGDRNVV

SEQ ID NO: 130378 - protein, 10 aa, synthetic construct
EAHRGDRNVV

SEQ ID NO: 130379 - protein, 10 aa, synthetic construct
EASRGDRNVV

SEQ ID NO: 130380 - protein, 10 aa, synthetic construct
EATRGDRNVV

SEQ ID NO: 130381 - protein, 10 aa, synthetic construct
EAYRGDRNVV

SEQ ID NO: 130382 - protein, 10 aa, synthetic construct
EANRGDRNVV

SEQ ID NO: 130383 - protein, 10 aa, synthetic construct
EAQRGDRNVV

SEQ ID NO: 130384 - protein, 10 aa, synthetic construct
EADRGDRNVV

SEQ ID NO: 130385 - protein, 10 aa, synthetic construct
EAERGDRNVV

SEQ ID NO: 130386 - protein, 10 aa, synthetic construct
EVGRGDRNVV

SEQ ID NO: 130387 - protein, 10 aa, synthetic construct
EVARGDRNVV

SEQ ID NO: 130388 - protein, 10 aa, synthetic construct
EVVRGDRNVV

SEQ ID NO: 130389 - protein, 10 aa, synthetic construct
EVPRGDRNVV

SEQ ID NO: 130390 - protein, 10 aa, synthetic construct
EVLRGDRNVV

SEQ ID NO: 130391 - protein, 10 aa, synthetic construct
EVIRGDRNVV

SEQ ID NO: 130392 - protein, 10 aa, synthetic construct
EVMRGDRNVV

SEQ ID NO: 130393 - protein, 10 aa, synthetic construct
EVWRGDRNVV

SEQ ID NO: 130394 - protein, 10 aa, synthetic construct
EVFRGDRNVV

SEQ ID NO: 130395 - protein, 10 aa, synthetic construct
EVKRGDRNVV

SEQ ID NO: 130396 - protein, 10 aa, synthetic construct
EVRRGDRNVV

SEQ ID NO: 130397 - protein, 10 aa, synthetic construct
EVHRGDRNVV

SEQ ID NO: 130398 - protein, 10 aa, synthetic construct
EVSRGDRNVV

SEQ ID NO: 130399 - protein, 10 aa, synthetic construct
EVTRGDRNVV

SEQ ID NO: 130400 - protein, 10 aa, synthetic construct
EVYRGDRNVV

SEQ ID NO: 130401 - protein, 10 aa, synthetic construct
EVNRGDRNVV

SEQ ID NO: 130402 - protein, 10 aa, synthetic construct
EVQRGDRNVV

SEQ ID NO: 130403 - protein, 10 aa, synthetic construct
EVDRGDRNVV

SEQ ID NO: 130404 - protein, 10 aa, synthetic construct
EVERGDRNVV

SEQ ID NO: 130405 - protein, 10 aa, synthetic construct
EPGRGDRNVV

SEQ ID NO: 130406 - protein, 10 aa, synthetic construct
EPARGDRNVV

SEQ ID NO: 130407 - protein, 10 aa, synthetic construct
EPVRGDRNVV

SEQ ID NO: 130408 - protein, 10 aa, synthetic construct
EPPRGDRNVV

SEQ ID NO: 130409 - protein, 10 aa, synthetic construct
EPLRGDRNVV

SEQ ID NO: 130410 - protein, 10 aa, synthetic construct
EPIRGDRNVV

SEQ ID NO: 130411 - protein, 10 aa, synthetic construct
EPMRGDRNVV

SEQ ID NO: 130412 - protein, 10 aa, synthetic construct
EPWRGDRNVV

SEQ ID NO: 130413 - protein, 10 aa, synthetic construct
EPFRGDRNVV

SEQ ID NO: 130414 - protein, 10 aa, synthetic construct
EPKRGDRNVV

SEQ ID NO: 130415 - protein, 10 aa, synthetic construct
EPRRGDRNVV

SEQ ID NO: 130416 - protein, 10 aa, synthetic construct
EPHRGDRNVV

SEQ ID NO: 130417 - protein, 10 aa, synthetic construct
EPSRGDRNVV

SEQ ID NO: 130418 - protein, 10 aa, synthetic construct
EPTRGDRNVV

SEQ ID NO: 130419 - protein, 10 aa, synthetic construct
EPYRGDRNVV

SEQ ID NO: 130420 - protein, 10 aa, synthetic construct
EPNRGDRNVV

SEQ ID NO: 130421 - protein, 10 aa, synthetic construct
EPQRGDRNVV

SEQ ID NO: 130422 - protein, 10 aa, synthetic construct
EPDRGDRNVV

SEQ ID NO: 130423 - protein, 10 aa, synthetic construct
EPERGDRNVV

SEQ ID NO: 130424 - protein, 10 aa, synthetic construct
ELGRGDRNVV

SEQ ID NO: 130425 - protein, 10 aa, synthetic construct
ELARGDRNVV

SEQ ID NO: 130426 - protein, 10 aa, synthetic construct
ELVRGDRNVV

SEQ ID NO: 130427 - protein, 10 aa, synthetic construct
ELPRGDRNVV

SEQ ID NO: 130428 - protein, 10 aa, synthetic construct
ELLRGDRNVV

SEQ ID NO: 130429 - protein, 10 aa, synthetic construct
ELIRGDRNVV

SEQ ID NO: 130430 - protein, 10 aa, synthetic construct
ELMRGDRNVV

SEQ ID NO: 130431 - protein, 10 aa, synthetic construct
ELWRGDRNVV

SEQ ID NO: 130432 - protein, 10 aa, synthetic construct
ELFRGDRNVV

SEQ ID NO: 130433 - protein, 10 aa, synthetic construct
ELKRGDRNVV

SEQ ID NO: 130434 - protein, 10 aa, synthetic construct
ELRRGDRNVV

SEQ ID NO: 130435 - protein, 10 aa, synthetic construct
ELHRGDRNVV

SEQ ID NO: 130436 - protein, 10 aa, synthetic construct
ELSRGDRNVV

SEQ ID NO: 130437 - protein, 10 aa, synthetic construct
ELTRGDRNVV

SEQ ID NO: 130438 - protein, 10 aa, synthetic construct
ELYRGDRNVV

SEQ ID NO: 130439 - protein, 10 aa, synthetic construct
ELNRGDRNVV

SEQ ID NO: 130440 - protein, 10 aa, synthetic construct
ELQRGDRNVV

SEQ ID NO: 130441 - protein, 10 aa, synthetic construct
ELDRGDRNVV

SEQ ID NO: 130442 - protein, 10 aa, synthetic construct
ELERGDRNVV

SEQ ID NO: 130443 - protein, 10 aa, synthetic construct
EIGRGDRNVV

SEQ ID NO: 130444 - protein, 10 aa, synthetic construct
EIARGDRNVV

SEQ ID NO: 130445 - protein, 10 aa, synthetic construct
EIVRGDRNVV

SEQ ID NO: 130446 - protein, 10 aa, synthetic construct
EIPRGDRNVV

SEQ ID NO: 130447 - protein, 10 aa, synthetic construct
EILRGDRNVV

SEQ ID NO: 130448 - protein, 10 aa, synthetic construct
EIIRGDRNVV

SEQ ID NO: 130449 - protein, 10 aa, synthetic construct
EIMRGDRNVV

SEQ ID NO: 130450 - protein, 10 aa, synthetic construct
EIWRGDRNVV

SEQ ID NO: 130451 - protein, 10 aa, synthetic construct
EIFRGDRNVV

SEQ ID NO: 130452 - protein, 10 aa, synthetic construct
EIKRGDRNVV

SEQ ID NO: 130453 - protein, 10 aa, synthetic construct
EIRRGDRNVV

SEQ ID NO: 130454 - protein, 10 aa, synthetic construct
EIHRGDRNVV

SEQ ID NO: 130455 - protein, 10 aa, synthetic construct
EISRGDRNVV

SEQ ID NO: 130456 - protein, 10 aa, synthetic construct
EITRGDRNVV

SEQ ID NO: 130457 - protein, 10 aa, synthetic construct
EIYRGDRNVV

SEQ ID NO: 130458 - protein, 10 aa, synthetic construct
EINRGDRNVV

SEQ ID NO: 130459 - protein, 10 aa, synthetic construct
EIQRGDRNVV

SEQ ID NO: 130460 - protein, 10 aa, synthetic construct
EIDRGDRNVV

SEQ ID NO: 130461 - protein, 10 aa, synthetic construct
EIERGDRNVV

SEQ ID NO: 130462 - protein, 10 aa, synthetic construct
EMGRGDRNVV

SEQ ID NO: 130463 - protein, 10 aa, synthetic construct
EMARGDRNVV

SEQ ID NO: 130464 - protein, 10 aa, synthetic construct
EMVRGDRNVV

SEQ ID NO: 130465 - protein, 10 aa, synthetic construct
EMPRGDRNVV

SEQ ID NO: 130466 - protein, 10 aa, synthetic construct
EMLRGDRNVV

SEQ ID NO: 130467 - protein, 10 aa, synthetic construct
EMIRGDRNVV

SEQ ID NO: 130468 - protein, 10 aa, synthetic construct
EMMRGDRNVV

SEQ ID NO: 130469 - protein, 10 aa, synthetic construct
EMWRGDRNVV

SEQ ID NO: 130470 - protein, 10 aa, synthetic construct
EMFRGDRNVV

SEQ ID NO: 130471 - protein, 10 aa, synthetic construct
EMKRGDRNVV

SEQ ID NO: 130472 - protein, 10 aa, synthetic construct
EMRRGDRNVV

SEQ ID NO: 130473 - protein, 10 aa, synthetic construct
EMHRGDRNVV

SEQ ID NO: 130474 - protein, 10 aa, synthetic construct
EMSRGDRNVV

SEQ ID NO: 130475 - protein, 10 aa, synthetic construct
EMTRGDRNVV

SEQ ID NO: 130476 - protein, 10 aa, synthetic construct
EMYRGDRNVV

SEQ ID NO: 130477 - protein, 10 aa, synthetic construct
EMNRGDRNVV

SEQ ID NO: 130478 - protein, 10 aa, synthetic construct
EMQRGDRNVV

SEQ ID NO: 130479 - protein, 10 aa, synthetic construct
EMDRGDRNVV

SEQ ID NO: 130480 - protein, 10 aa, synthetic construct
EMERGDRNVV

SEQ ID NO: 130481 - protein, 10 aa, synthetic construct
EWGRGDRNVV

SEQ ID NO: 130482 - protein, 10 aa, synthetic construct
EWARGDRNVV

SEQ ID NO: 130483 - protein, 10 aa, synthetic construct
EWVRGDRNVV

SEQ ID NO: 130484 - protein, 10 aa, synthetic construct
EWPRGDRNVV

SEQ ID NO: 130485 - protein, 10 aa, synthetic construct
EWLRGDRNVV

SEQ ID NO: 130486 - protein, 10 aa, synthetic construct
EWIRGDRNVV

SEQ ID NO: 130487 - protein, 10 aa, synthetic construct
EWMRGDRNVV

SEQ ID NO: 130488 - protein, 10 aa, synthetic construct
EWWRGDRNVV

SEQ ID NO: 130489 - protein, 10 aa, synthetic construct
EWFRGDRNVV

SEQ ID NO: 130490 - protein, 10 aa, synthetic construct
EWKRGDRNVV

SEQ ID NO: 130491 - protein, 10 aa, synthetic construct
EWRRGDRNVV

SEQ ID NO: 130492 - protein, 10 aa, synthetic construct
EWHRGDRNVV

SEQ ID NO: 130493 - protein, 10 aa, synthetic construct
EWSRGDRNVV

SEQ ID NO: 130494 - protein, 10 aa, synthetic construct
EWTRGDRNVV

SEQ ID NO: 130495 - protein, 10 aa, synthetic construct
EWYRGDRNVV

SEQ ID NO: 130496 - protein, 10 aa, synthetic construct
EWNRGDRNVV

SEQ ID NO: 130497 - protein, 10 aa, synthetic construct
EWQRGDRNVV

SEQ ID NO: 130498 - protein, 10 aa, synthetic construct
EWDRGDRNVV

SEQ ID NO: 130499 - protein, 10 aa, synthetic construct
EWERGDRNVV

SEQ ID NO: 130500 - protein, 10 aa, synthetic construct
EFGRGDRNVV

SEQ ID NO: 130501 - protein, 10 aa, synthetic construct
EFARGDRNVV

SEQ ID NO: 130502 - protein, 10 aa, synthetic construct
EFVRGDRNVV

SEQ ID NO: 130503 - protein, 10 aa, synthetic construct
EFPRGDRNVV

SEQ ID NO: 130504 - protein, 10 aa, synthetic construct
EFLRGDRNVV

SEQ ID NO: 130505 - protein, 10 aa, synthetic construct
EFIRGDRNVV

SEQ ID NO: 130506 - protein, 10 aa, synthetic construct
EFMRGDRNVV

SEQ ID NO: 130507 - protein, 10 aa, synthetic construct
EFWRGDRNVV

SEQ ID NO: 130508 - protein, 10 aa, synthetic construct
EFFRGDRNVV

SEQ ID NO: 130509 - protein, 10 aa, synthetic construct
EFKRGDRNVV

SEQ ID NO: 130510 - protein, 10 aa, synthetic construct
EFRRGDRNVV

SEQ ID NO: 130511 - protein, 10 aa, synthetic construct
EFHRGDRNVV

SEQ ID NO: 130512 - protein, 10 aa, synthetic construct
EFSRGDRNVV

SEQ ID NO: 130513 - protein, 10 aa, synthetic construct
EFTRGDRNVV

SEQ ID NO: 130514 - protein, 10 aa, synthetic construct
EFYRGDRNVV

SEQ ID NO: 130515 - protein, 10 aa, synthetic construct
EFNRGDRNVV

SEQ ID NO: 130516 - protein, 10 aa, synthetic construct
EFQRGDRNVV

SEQ ID NO: 130517 - protein, 10 aa, synthetic construct
EFDRGDRNVV

SEQ ID NO: 130518 - protein, 10 aa, synthetic construct
EFERGDRNVV

SEQ ID NO: 130519 - protein, 10 aa, synthetic construct
EKGRGDRNVV

SEQ ID NO: 130520 - protein, 10 aa, synthetic construct
EKARGDRNVV

SEQ ID NO: 130521 - protein, 10 aa, synthetic construct
EKVRGDRNVV

SEQ ID NO: 130522 - protein, 10 aa, synthetic construct
EKPRGDRNVV

SEQ ID NO: 130523 - protein, 10 aa, synthetic construct
EKLRGDRNVV

SEQ ID NO: 130524 - protein, 10 aa, synthetic construct
EKIRGDRNVV

SEQ ID NO: 130525 - protein, 10 aa, synthetic construct
EKMRGDRNVV

SEQ ID NO: 130526 - protein, 10 aa, synthetic construct
EKWRGDRNVV

SEQ ID NO: 130527 - protein, 10 aa, synthetic construct
EKFRGDRNVV

SEQ ID NO: 130528 - protein, 10 aa, synthetic construct
EKKRGDRNVV

SEQ ID NO: 130529 - protein, 10 aa, synthetic construct
EKRRGDRNVV

SEQ ID NO: 130530 - protein, 10 aa, synthetic construct
EKHRGDRNVV

SEQ ID NO: 130531 - protein, 10 aa, synthetic construct
EKSRGDRNVV

SEQ ID NO: 130532 - protein, 10 aa, synthetic construct
EKTRGDRNVV

SEQ ID NO: 130533 - protein, 10 aa, synthetic construct
EKYRGDRNVV

SEQ ID NO: 130534 - protein, 10 aa, synthetic construct
EKNRGDRNVV

SEQ ID NO: 130535 - protein, 10 aa, synthetic construct
EKQRGDRNVV

SEQ ID NO: 130536 - protein, 10 aa, synthetic construct
EKDRGDRNVV

SEQ ID NO: 130537 - protein, 10 aa, synthetic construct
EKERGDRNVV

SEQ ID NO: 130538 - protein, 10 aa, synthetic construct
ERGRGDRNVV

SEQ ID NO: 130539 - protein, 10 aa, synthetic construct
ERARGDRNVV

SEQ ID NO: 130540 - protein, 10 aa, synthetic construct
ERVRGDRNVV

SEQ ID NO: 130541 - protein, 10 aa, synthetic construct
ERPRGDRNVV

SEQ ID NO: 130542 - protein, 10 aa, synthetic construct
ERLRGDRNVV

SEQ ID NO: 130543 - protein, 10 aa, synthetic construct
ERIRGDRNVV

SEQ ID NO: 130544 - protein, 10 aa, synthetic construct
ERMRGDRNVV

SEQ ID NO: 130545 - protein, 10 aa, synthetic construct
ERWRGDRNVV

SEQ ID NO: 130546 - protein, 10 aa, synthetic construct
ERFRGDRNVV

SEQ ID NO: 130547 - protein, 10 aa, synthetic construct
ERKRGDRNVV

SEQ ID NO: 130548 - protein, 10 aa, synthetic construct
ERRRGDRNVV

SEQ ID NO: 130549 - protein, 10 aa, synthetic construct
ERHRGDRNVV

SEQ ID NO: 130550 - protein, 10 aa, synthetic construct
ERSRGDRNVV

SEQ ID NO: 130551 - protein, 10 aa, synthetic construct
ERTRGDRNVV

SEQ ID NO: 130552 - protein, 10 aa, synthetic construct
ERYRGDRNVV

SEQ ID NO: 130553 - protein, 10 aa, synthetic construct
ERNRGDRNVV

SEQ ID NO: 130554 - protein, 10 aa, synthetic construct
ERQRGDRNVV

SEQ ID NO: 130555 - protein, 10 aa, synthetic construct
ERDRGDRNVV

SEQ ID NO: 130556 - protein, 10 aa, synthetic construct
ERERGDRNVV

SEQ ID NO: 130557 - protein, 10 aa, synthetic construct
EHGRGDRNVV

SEQ ID NO: 130558 - protein, 10 aa, synthetic construct
EHARGDRNVV

SEQ ID NO: 130559 - protein, 10 aa, synthetic construct
EHVRGDRNVV

SEQ ID NO: 130560 - protein, 10 aa, synthetic construct
EHPRGDRNVV

SEQ ID NO: 130561 - protein, 10 aa, synthetic construct
EHLRGDRNVV

SEQ ID NO: 130562 - protein, 10 aa, synthetic construct
EHIRGDRNVV

SEQ ID NO: 130563 - protein, 10 aa, synthetic construct
EHMRGDRNVV

SEQ ID NO: 130564 - protein, 10 aa, synthetic construct
EHWRGDRNVV

SEQ ID NO: 130565 - protein, 10 aa, synthetic construct
EHFRGDRNVV

SEQ ID NO: 130566 - protein, 10 aa, synthetic construct
EHKRGDRNVV

SEQ ID NO: 130567 - protein, 10 aa, synthetic construct
EHRRGDRNVV

SEQ ID NO: 130568 - protein, 10 aa, synthetic construct
EHHRGDRNVV

SEQ ID NO: 130569 - protein, 10 aa, synthetic construct
EHSRGDRNVV

SEQ ID NO: 130570 - protein, 10 aa, synthetic construct
EHTRGDRNVV

SEQ ID NO: 130571 - protein, 10 aa, synthetic construct
EHYRGDRNVV

SEQ ID NO: 130572 - protein, 10 aa, synthetic construct
EHNRGDRNVV

SEQ ID NO: 130573 - protein, 10 aa, synthetic construct
EHQRGDRNVV

SEQ ID NO: 130574 - protein, 10 aa, synthetic construct
EHDRGDRNVV

SEQ ID NO: 130575 - protein, 10 aa, synthetic construct
EHERGDRNVV

SEQ ID NO: 130576 - protein, 10 aa, synthetic construct
ESGRGDRNVV

SEQ ID NO: 130577 - protein, 10 aa, synthetic construct
ESARGDRNVV

SEQ ID NO: 130578 - protein, 10 aa, synthetic construct
ESVRGDRNVV

SEQ ID NO: 130579 - protein, 10 aa, synthetic construct
ESPRGDRNVV

SEQ ID NO: 130580 - protein, 10 aa, synthetic construct
ESLRGDRNVV

SEQ ID NO: 130581 - protein, 10 aa, synthetic construct
ESIRGDRNVV

SEQ ID NO: 130582 - protein, 10 aa, synthetic construct
ESMRGDRNVV

SEQ ID NO: 130583 - protein, 10 aa, synthetic construct
ESWRGDRNVV

SEQ ID NO: 130584 - protein, 10 aa, synthetic construct
ESFRGDRNVV

SEQ ID NO: 130585 - protein, 10 aa, synthetic construct
ESKRGDRNVV

SEQ ID NO: 130586 - protein, 10 aa, synthetic construct
ESRRGDRNVV

SEQ ID NO: 130587 - protein, 10 aa, synthetic construct
ESHRGDRNVV

SEQ ID NO: 130588 - protein, 10 aa, synthetic construct
ESSRGDRNVV

SEQ ID NO: 130589 - protein, 10 aa, synthetic construct
ESTRGDRNVV

SEQ ID NO: 130590 - protein, 10 aa, synthetic construct
ESYRGDRNVV

SEQ ID NO: 130591 - protein, 10 aa, synthetic construct
ESNRGDRNVV

SEQ ID NO: 130592 - protein, 10 aa, synthetic construct
ESQRGDRNVV

SEQ ID NO: 130593 - protein, 10 aa, synthetic construct
ESDRGDRNVV

SEQ ID NO: 130594 - protein, 10 aa, synthetic construct
ESERGDRNVV

SEQ ID NO: 130595 - protein, 10 aa, synthetic construct
ETGRGDRNVV

SEQ ID NO: 130596 - protein, 10 aa, synthetic construct
ETARGDRNVV

SEQ ID NO: 130597 - protein, 10 aa, synthetic construct
ETVRGDRNVV

SEQ ID NO: 130598 - protein, 10 aa, synthetic construct
ETPRGDRNVV

SEQ ID NO: 130599 - protein, 10 aa, synthetic construct
ETLRGDRNVV

SEQ ID NO: 130600 - protein, 10 aa, synthetic construct
ETIRGDRNVV

SEQ ID NO: 130601 - protein, 10 aa, synthetic construct
ETMRGDRNVV

SEQ ID NO: 130602 - protein, 10 aa, synthetic construct
ETWRGDRNVV

SEQ ID NO: 130603 - protein, 10 aa, synthetic construct
ETFRGDRNVV

SEQ ID NO: 130604 - protein, 10 aa, synthetic construct
ETKRGDRNVV

SEQ ID NO: 130605 - protein, 10 aa, synthetic construct
ETRRGDRNVV

SEQ ID NO: 130606 - protein, 10 aa, synthetic construct
ETHRGDRNVV

SEQ ID NO: 130607 - protein, 10 aa, synthetic construct
ETSRGDRNVV

SEQ ID NO: 130608 - protein, 10 aa, synthetic construct
ETTRGDRNVV

SEQ ID NO: 130609 - protein, 10 aa, synthetic construct
ETYRGDRNVV

SEQ ID NO: 130610 - protein, 10 aa, synthetic construct
ETNRGDRNVV

SEQ ID NO: 130611 - protein, 10 aa, synthetic construct
ETQRGDRNVV

SEQ ID NO: 130612 - protein, 10 aa, synthetic construct
ETDRGDRNVV

SEQ ID NO: 130613 - protein, 10 aa, synthetic construct
ETERGDRNVV

SEQ ID NO: 130614 - protein, 10 aa, synthetic construct
EYGRGDRNVV

SEQ ID NO: 130615 - protein, 10 aa, synthetic construct
EYARGDRNVV

SEQ ID NO: 130616 - protein, 10 aa, synthetic construct
EYVRGDRNVV

SEQ ID NO: 130617 - protein, 10 aa, synthetic construct
EYPRGDRNVV

SEQ ID NO: 130618 - protein, 10 aa, synthetic construct
EYLRGDRNVV

SEQ ID NO: 130619 - protein, 10 aa, synthetic construct
EYIRGDRNVV

SEQ ID NO: 130620 - protein, 10 aa, synthetic construct
EYMRGDRNVV

SEQ ID NO: 130621 - protein, 10 aa, synthetic construct
EYWRGDRNVV

SEQ ID NO: 130622 - protein, 10 aa, synthetic construct
EYFRGDRNVV

SEQ ID NO: 130623 - protein, 10 aa, synthetic construct
EYKRGDRNVV

SEQ ID NO: 130624 - protein, 10 aa, synthetic construct
EYRRGDRNVV

SEQ ID NO: 130625 - protein, 10 aa, synthetic construct
EYHRGDRNVV

SEQ ID NO: 130626 - protein, 10 aa, synthetic construct
EYSRGDRNVV

SEQ ID NO: 130627 - protein, 10 aa, synthetic construct
EYTRGDRNVV

SEQ ID NO: 130628 - protein, 10 aa, synthetic construct
EYYRGDRNVV

SEQ ID NO: 130629 - protein, 10 aa, synthetic construct
EYNRGDRNVV

SEQ ID NO: 130630 - protein, 10 aa, synthetic construct
EYQRGDRNVV

SEQ ID NO: 130631 - protein, 10 aa, synthetic construct
EYDRGDRNVV

SEQ ID NO: 130632 - protein, 10 aa, synthetic construct
EYERGDRNVV

SEQ ID NO: 130633 - protein, 10 aa, synthetic construct
ENGRGDRNVV

SEQ ID NO: 130634 - protein, 10 aa, synthetic construct
ENARGDRNVV

SEQ ID NO: 130635 - protein, 10 aa, synthetic construct
ENVRGDRNVV

SEQ ID NO: 130636 - protein, 10 aa, synthetic construct
ENPRGDRNVV

SEQ ID NO: 130637 - protein, 10 aa, synthetic construct
ENLRGDRNVV

SEQ ID NO: 130638 - protein, 10 aa, synthetic construct
ENIRGDRNVV

SEQ ID NO: 130639 - protein, 10 aa, synthetic construct
ENMRGDRNVV

SEQ ID NO: 130640 - protein, 10 aa, synthetic construct
ENWRGDRNVV

SEQ ID NO: 130641 - protein, 10 aa, synthetic construct
ENFRGDRNVV

SEQ ID NO: 130642 - protein, 10 aa, synthetic construct
ENKRGDRNVV

SEQ ID NO: 130643 - protein, 10 aa, synthetic construct
ENRRGDRNVV

SEQ ID NO: 130644 - protein, 10 aa, synthetic construct
ENHRGDRNVV

SEQ ID NO: 130645 - protein, 10 aa, synthetic construct
ENSRGDRNVV

SEQ ID NO: 130646 - protein, 10 aa, synthetic construct
ENTRGDRNVV

SEQ ID NO: 130647 - protein, 10 aa, synthetic construct
ENYRGDRNVV

SEQ ID NO: 130648 - protein, 10 aa, synthetic construct
ENNRGDRNVV

SEQ ID NO: 130649 - protein, 10 aa, synthetic construct
ENQRGDRNVV

SEQ ID NO: 130650 - protein, 10 aa, synthetic construct
ENDRGDRNVV

SEQ ID NO: 130651 - protein, 10 aa, synthetic construct
ENERGDRNVV

SEQ ID NO: 130652 - protein, 10 aa, synthetic construct
EQGRGDRNVV

SEQ ID NO: 130653 - protein, 10 aa, synthetic construct
EQARGDRNVV

SEQ ID NO: 130654 - protein, 10 aa, synthetic construct
EQVRGDRNVV

SEQ ID NO: 130655 - protein, 10 aa, synthetic construct
EQPRGDRNVV

SEQ ID NO: 130656 - protein, 10 aa, synthetic construct
EQLRGDRNVV

SEQ ID NO: 130657 - protein, 10 aa, synthetic construct
EQIRGDRNVV

SEQ ID NO: 130658 - protein, 10 aa, synthetic construct
EQMRGDRNVV

SEQ ID NO: 130659 - protein, 10 aa, synthetic construct
EQWRGDRNVV

SEQ ID NO: 130660 - protein, 10 aa, synthetic construct
EQFRGDRNVV

SEQ ID NO: 130661 - protein, 10 aa, synthetic construct
EQKRGDRNVV

SEQ ID NO: 130662 - protein, 10 aa, synthetic construct
EQRRGDRNVV

SEQ ID NO: 130663 - protein, 10 aa, synthetic construct
EQHRGDRNVV

SEQ ID NO: 130664 - protein, 10 aa, synthetic construct
EQSRGDRNVV

SEQ ID NO: 130665 - protein, 10 aa, synthetic construct
EQTRGDRNVV

SEQ ID NO: 130666 - protein, 10 aa, synthetic construct
EQYRGDRNVV

SEQ ID NO: 130667 - protein, 10 aa, synthetic construct
EQNRGDRNVV

SEQ ID NO: 130668 - protein, 10 aa, synthetic construct
EQQRGDRNVV

SEQ ID NO: 130669 - protein, 10 aa, synthetic construct
EQDRGDRNVV

SEQ ID NO: 130670 - protein, 10 aa, synthetic construct
EQERGDRNVV

SEQ ID NO: 130671 - protein, 10 aa, synthetic construct
EDGRGDRNVV

SEQ ID NO: 130672 - protein, 10 aa, synthetic construct
EDARGDRNVV

SEQ ID NO: 130673 - protein, 10 aa, synthetic construct
EDVRGDRNVV

SEQ ID NO: 130674 - protein, 10 aa, synthetic construct
EDPRGDRNVV

SEQ ID NO: 130675 - protein, 10 aa, synthetic construct
EDLRGDRNVV

SEQ ID NO: 130676 - protein, 10 aa, synthetic construct
EDIRGDRNVV

SEQ ID NO: 130677 - protein, 10 aa, synthetic construct
EDMRGDRNVV

SEQ ID NO: 130678 - protein, 10 aa, synthetic construct
EDWRGDRNVV

SEQ ID NO: 130679 - protein, 10 aa, synthetic construct
EDFRGDRNVV

SEQ ID NO: 130680 - protein, 10 aa, synthetic construct
EDKRGDRNVV

SEQ ID NO: 130681 - protein, 10 aa, synthetic construct
EDRRGDRNVV

SEQ ID NO: 130682 - protein, 10 aa, synthetic construct
EDHRGDRNVV

SEQ ID NO: 130683 - protein, 10 aa, synthetic construct
EDSRGDRNVV

SEQ ID NO: 130684 - protein, 10 aa, synthetic construct
EDTRGDRNVV

SEQ ID NO: 130685 - protein, 10 aa, synthetic construct
EDYRGDRNVV

SEQ ID NO: 130686 - protein, 10 aa, synthetic construct
EDNRGDRNVV

SEQ ID NO: 130687 - protein, 10 aa, synthetic construct
EDQRGDRNVV

SEQ ID NO: 130688 - protein, 10 aa, synthetic construct
EDDRGDRNVV

SEQ ID NO: 130689 - protein, 10 aa, synthetic construct
EDERGDRNVV

SEQ ID NO: 130690 - protein, 10 aa, synthetic construct
EEGRGDRNVV

SEQ ID NO: 130691 - protein, 10 aa, synthetic construct
EEARGDRNVV

SEQ ID NO: 130692 - protein, 10 aa, synthetic construct
EEVRGDRNVV

SEQ ID NO: 130693 - protein, 10 aa, synthetic construct
EEPRGDRNVV

SEQ ID NO: 130694 - protein, 10 aa, synthetic construct
EELRGDRNVV

SEQ ID NO: 130695 - protein, 10 aa, synthetic construct
EEIRGDRNVV

SEQ ID NO: 130696 - protein, 10 aa, synthetic construct
EEMRGDRNVV

SEQ ID NO: 130697 - protein, 10 aa, synthetic construct
EEWRGDRNVV

SEQ ID NO: 130698 - protein, 10 aa, synthetic construct
EEFRGDRNVV

SEQ ID NO: 130699 - protein, 10 aa, synthetic construct
EEKRGDRNVV

SEQ ID NO: 130700 - protein, 10 aa, synthetic construct
EERRGDRNVV

SEQ ID NO: 130701 - protein, 10 aa, synthetic construct
EEHRGDRNVV

SEQ ID NO: 130702 - protein, 10 aa, synthetic construct
EESRGDRNVV

SEQ ID NO: 130703 - protein, 10 aa, synthetic construct
EETRGDRNVV

SEQ ID NO: 130704 - protein, 10 aa, synthetic construct
EEYRGDRNVV

SEQ ID NO: 130705 - protein, 10 aa, synthetic construct
EENRGDRNVV

SEQ ID NO: 130706 - protein, 10 aa, synthetic construct
EEQRGDRNVV

SEQ ID NO: 130707 - protein, 10 aa, synthetic construct
EEDRGDRNVV

SEQ ID NO: 130708 - protein, 10 aa, synthetic construct
EEERGDRNVV

SEQ ID NO: 130709 - protein, 10 aa, synthetic construct
NGGRGDRNVV

SEQ ID NO: 130710 - protein, 10 aa, synthetic construct
NGARGDRNVV

SEQ ID NO: 130711 - protein, 10 aa, synthetic construct
NGVRGDRNVV

SEQ ID NO: 130712 - protein, 10 aa, synthetic construct
NGPRGDRNVV

SEQ ID NO: 130713 - protein, 10 aa, synthetic construct
NGLRGDRNVV

SEQ ID NO: 130714 - protein, 10 aa, synthetic construct
NGIRGDRNVV

SEQ ID NO: 130715 - protein, 10 aa, synthetic construct
NGMRGDRNVV

SEQ ID NO: 130716 - protein, 10 aa, synthetic construct
NGWRGDRNVV

SEQ ID NO: 130717 - protein, 10 aa, synthetic construct
NGFRGDRNVV

SEQ ID NO: 130718 - protein, 10 aa, synthetic construct
NGKRGDRNVV

SEQ ID NO: 130719 - protein, 10 aa, synthetic construct
NGRRGDRNVV

SEQ ID NO: 130720 - protein, 10 aa, synthetic construct
NGHRGDRNVV

SEQ ID NO: 130721 - protein, 10 aa, synthetic construct
NGSRGDRNVV

SEQ ID NO: 130722 - protein, 10 aa, synthetic construct
NGTRGDRNVV

SEQ ID NO: 130723 - protein, 10 aa, synthetic construct
NGYRGDRNVV

SEQ ID NO: 130724 - protein, 10 aa, synthetic construct
NGNRGDRNVV

SEQ ID NO: 130725 - protein, 10 aa, synthetic construct
NGQRGDRNVV

SEQ ID NO: 130726 - protein, 10 aa, synthetic construct
NGDRGDRNVV

SEQ ID NO: 130727 - protein, 10 aa, synthetic construct
NGERGDRNVV

SEQ ID NO: 130728 - protein, 10 aa, synthetic construct
NAGRGDRNVV

SEQ ID NO: 130729 - protein, 10 aa, synthetic construct
NAARGDRNVV

SEQ ID NO: 130730 - protein, 10 aa, synthetic construct
NAVRGDRNVV

SEQ ID NO: 130731 - protein, 10 aa, synthetic construct
NAPRGDRNVV

SEQ ID NO: 130732 - protein, 10 aa, synthetic construct
NALRGDRNVV

SEQ ID NO: 130733 - protein, 10 aa, synthetic construct
NAIRGDRNVV

SEQ ID NO: 130734 - protein, 10 aa, synthetic construct
NAMRGDRNVV

SEQ ID NO: 130735 - protein, 10 aa, synthetic construct
NAWRGDRNVV

SEQ ID NO: 130736 - protein, 10 aa, synthetic construct
NAFRGDRNVV

SEQ ID NO: 130737 - protein, 10 aa, synthetic construct
NAKRGDRNVV

SEQ ID NO: 130738 - protein, 10 aa, synthetic construct
NARRGDRNVV

SEQ ID NO: 130739 - protein, 10 aa, synthetic construct
NAHRGDRNVV

SEQ ID NO: 130740 - protein, 10 aa, synthetic construct
NASRGDRNVV

SEQ ID NO: 130741 - protein, 10 aa, synthetic construct
NATRGDRNVV

SEQ ID NO: 130742 - protein, 10 aa, synthetic construct
NAYRGDRNVV

SEQ ID NO: 130743 - protein, 10 aa, synthetic construct
NANRGDRNVV

SEQ ID NO: 130744 - protein, 10 aa, synthetic construct
NAQRGDRNVV

SEQ ID NO: 130745 - protein, 10 aa, synthetic construct
NADRGDRNVV

SEQ ID NO: 130746 - protein, 10 aa, synthetic construct
NAERGDRNVV

SEQ ID NO: 130747 - protein, 10 aa, synthetic construct
NVGRGDRNVV

SEQ ID NO: 130748 - protein, 10 aa, synthetic construct
NVARGDRNVV

SEQ ID NO: 130749 - protein, 10 aa, synthetic construct
NVVRGDRNVV

SEQ ID NO: 130750 - protein, 10 aa, synthetic construct
NVPRGDRNVV

SEQ ID NO: 130751 - protein, 10 aa, synthetic construct
NVLRGDRNVV

SEQ ID NO: 130752 - protein, 10 aa, synthetic construct
NVIRGDRNVV

SEQ ID NO: 130753 - protein, 10 aa, synthetic construct
NVMRGDRNVV

SEQ ID NO: 130754 - protein, 10 aa, synthetic construct
NVWRGDRNVV

SEQ ID NO: 130755 - protein, 10 aa, synthetic construct
NVFRGDRNVV

SEQ ID NO: 130756 - protein, 10 aa, synthetic construct
NVKRGDRNVV

SEQ ID NO: 130757 - protein, 10 aa, synthetic construct
NVRRGDRNVV

SEQ ID NO: 130758 - protein, 10 aa, synthetic construct
NVHRGDRNVV

SEQ ID NO: 130759 - protein, 10 aa, synthetic construct
NVSRGDRNVV

SEQ ID NO: 130760 - protein, 10 aa, synthetic construct
NVTRGDRNVV

SEQ ID NO: 130761 - protein, 10 aa, synthetic construct
NVYRGDRNVV

SEQ ID NO: 130762 - protein, 10 aa, synthetic construct
NVNRGDRNVV

SEQ ID NO: 130763 - protein, 10 aa, synthetic construct
NVQRGDRNVV

SEQ ID NO: 130764 - protein, 10 aa, synthetic construct
NVDRGDRNVV

SEQ ID NO: 130765 - protein, 10 aa, synthetic construct
NVERGDRNVV

SEQ ID NO: 130766 - protein, 10 aa, synthetic construct
NPGRGDRNVV

SEQ ID NO: 130767 - protein, 10 aa, synthetic construct
NPARGDRNVV

SEQ ID NO: 130768 - protein, 10 aa, synthetic construct
NPVRGDRNVV

SEQ ID NO: 130769 - protein, 10 aa, synthetic construct
NPPRGDRNVV

SEQ ID NO: 130770 - protein, 10 aa, synthetic construct
NPLRGDRNVV

SEQ ID NO: 130771 - protein, 10 aa, synthetic construct
NPIRGDRNVV

SEQ ID NO: 130772 - protein, 10 aa, synthetic construct
NPMRGDRNVV

SEQ ID NO: 130773 - protein, 10 aa, synthetic construct
NPWRGDRNVV

SEQ ID NO: 130774 - protein, 10 aa, synthetic construct
NPFRGDRNVV

SEQ ID NO: 130775 - protein, 10 aa, synthetic construct
NPKRGDRNVV

SEQ ID NO: 130776 - protein, 10 aa, synthetic construct
NPRRGDRNVV

SEQ ID NO: 130777 - protein, 10 aa, synthetic construct
NPHRGDRNVV

SEQ ID NO: 130778 - protein, 10 aa, synthetic construct
NPSRGDRNVV

SEQ ID NO: 130779 - protein, 10 aa, synthetic construct
NPTRGDRNVV

SEQ ID NO: 130780 - protein, 10 aa, synthetic construct
NPYRGDRNVV

SEQ ID NO: 130781 - protein, 10 aa, synthetic construct
NPNRGDRNVV

SEQ ID NO: 130782 - protein, 10 aa, synthetic construct
NPQRGDRNVV

SEQ ID NO: 130783 - protein, 10 aa, synthetic construct
NPDRGDRNVV

SEQ ID NO: 130784 - protein, 10 aa, synthetic construct
NPERGDRNVV

SEQ ID NO: 130785 - protein, 10 aa, synthetic construct
NLGRGDRNVV

SEQ ID NO: 130786 - protein, 10 aa, synthetic construct
NLARGDRNVV

SEQ ID NO: 130787 - protein, 10 aa, synthetic construct
NLVRGDRNVV

SEQ ID NO: 130788 - protein, 10 aa, synthetic construct
NLPRGDRNVV

SEQ ID NO: 130789 - protein, 10 aa, synthetic construct
NLLRGDRNVV

SEQ ID NO: 130790 - protein, 10 aa, synthetic construct
NLIRGDRNVV

SEQ ID NO: 130791 - protein, 10 aa, synthetic construct
NLMRGDRNVV

SEQ ID NO: 130792 - protein, 10 aa, synthetic construct
NLWRGDRNVV

SEQ ID NO: 130793 - protein, 10 aa, synthetic construct
NLFRGDRNVV

SEQ ID NO: 130794 - protein, 10 aa, synthetic construct
NLKRGDRNVV

SEQ ID NO: 130795 - protein, 10 aa, synthetic construct
NLRRGDRNVV

SEQ ID NO: 130796 - protein, 10 aa, synthetic construct
NLHRGDRNVV

SEQ ID NO: 130797 - protein, 10 aa, synthetic construct
NLSRGDRNVV

SEQ ID NO: 130798 - protein, 10 aa, synthetic construct
NLTRGDRNVV

SEQ ID NO: 130799 - protein, 10 aa, synthetic construct
NLYRGDRNVV

SEQ ID NO: 130800 - protein, 10 aa, synthetic construct
NLNRGDRNVV

SEQ ID NO: 130801 - protein, 10 aa, synthetic construct
NLQRGDRNVV

SEQ ID NO: 130802 - protein, 10 aa, synthetic construct
NLDRGDRNVV

SEQ ID NO: 130803 - protein, 10 aa, synthetic construct
NLERGDRNVV

SEQ ID NO: 130804 - protein, 10 aa, synthetic construct
NIGRGDRNVV

SEQ ID NO: 130805 - protein, 10 aa, synthetic construct
NIARGDRNVV

SEQ ID NO: 130806 - protein, 10 aa, synthetic construct
NIVRGDRNVV

SEQ ID NO: 130807 - protein, 10 aa, synthetic construct
NIPRGDRNVV

SEQ ID NO: 130808 - protein, 10 aa, synthetic construct
NILRGDRNVV

SEQ ID NO: 130809 - protein, 10 aa, synthetic construct
NIIRGDRNVV

SEQ ID NO: 130810 - protein, 10 aa, synthetic construct
NIMRGDRNVV

SEQ ID NO: 130811 - protein, 10 aa, synthetic construct
NIWRGDRNVV

SEQ ID NO: 130812 - protein, 10 aa, synthetic construct
NIFRGDRNVV

SEQ ID NO: 130813 - protein, 10 aa, synthetic construct
NIKRGDRNVV

SEQ ID NO: 130814 - protein, 10 aa, synthetic construct
NIRRGDRNVV

SEQ ID NO: 130815 - protein, 10 aa, synthetic construct
NIHRGDRNVV

SEQ ID NO: 130816 - protein, 10 aa, synthetic construct
NISRGDRNVV

SEQ ID NO: 130817 - protein, 10 aa, synthetic construct
NITRGDRNVV

SEQ ID NO: 130818 - protein, 10 aa, synthetic construct
NIYRGDRNVV

SEQ ID NO: 130819 - protein, 10 aa, synthetic construct
NINRGDRNVV

SEQ ID NO: 130820 - protein, 10 aa, synthetic construct
NIQRGDRNVV

SEQ ID NO: 130821 - protein, 10 aa, synthetic construct
NIDRGDRNVV

SEQ ID NO: 130822 - protein, 10 aa, synthetic construct
NIERGDRNVV

SEQ ID NO: 130823 - protein, 10 aa, synthetic construct
NMGRGDRNVV

SEQ ID NO: 130824 - protein, 10 aa, synthetic construct
NMARGDRNVV

SEQ ID NO: 130825 - protein, 10 aa, synthetic construct
NMVRGDRNVV

SEQ ID NO: 130826 - protein, 10 aa, synthetic construct
NMPRGDRNVV

SEQ ID NO: 130827 - protein, 10 aa, synthetic construct
NMLRGDRNVV

SEQ ID NO: 130828 - protein, 10 aa, synthetic construct
NMIRGDRNVV

SEQ ID NO: 130829 - protein, 10 aa, synthetic construct
NMMRGDRNVV

SEQ ID NO: 130830 - protein, 10 aa, synthetic construct
NMWRGDRNVV

SEQ ID NO: 130831 - protein, 10 aa, synthetic construct
NMFRGDRNVV

SEQ ID NO: 130832 - protein, 10 aa, synthetic construct
NMKRGDRNVV

SEQ ID NO: 130833 - protein, 10 aa, synthetic construct
NMRRGDRNVV

SEQ ID NO: 130834 - protein, 10 aa, synthetic construct
NMHRGDRNVV

SEQ ID NO: 130835 - protein, 10 aa, synthetic construct
NMSRGDRNVV

SEQ ID NO: 130836 - protein, 10 aa, synthetic construct
NMTRGDRNVV

SEQ ID NO: 130837 - protein, 10 aa, synthetic construct
NMYRGDRNVV

SEQ ID NO: 130838 - protein, 10 aa, synthetic construct
NMNRGDRNVV

SEQ ID NO: 130839 - protein, 10 aa, synthetic construct
NMQRGDRNVV

SEQ ID NO: 130840 - protein, 10 aa, synthetic construct
NMDRGDRNVV

SEQ ID NO: 130841 - protein, 10 aa, synthetic construct
NMERGDRNVV

SEQ ID NO: 130842 - protein, 10 aa, synthetic construct
NWGRGDRNVV

SEQ ID NO: 130843 - protein, 10 aa, synthetic construct
NWARGDRNVV

SEQ ID NO: 130844 - protein, 10 aa, synthetic construct
NWVRGDRNVV

SEQ ID NO: 130845 - protein, 10 aa, synthetic construct
NWPRGDRNVV

SEQ ID NO: 130846 - protein, 10 aa, synthetic construct
NWLRGDRNVV

SEQ ID NO: 130847 - protein, 10 aa, synthetic construct
NWIRGDRNVV

SEQ ID NO: 130848 - protein, 10 aa, synthetic construct
NWMRGDRNVV

SEQ ID NO: 130849 - protein, 10 aa, synthetic construct
NWWRGDRNVV

SEQ ID NO: 130850 - protein, 10 aa, synthetic construct
NWFRGDRNVV

SEQ ID NO: 130851 - protein, 10 aa, synthetic construct
NWKRGDRNVV

SEQ ID NO: 130852 - protein, 10 aa, synthetic construct
NWRRGDRNVV

SEQ ID NO: 130853 - protein, 10 aa, synthetic construct
NWHRGDRNVV

SEQ ID NO: 130854 - protein, 10 aa, synthetic construct
NWSRGDRNVV

SEQ ID NO: 130855 - protein, 10 aa, synthetic construct
NWTRGDRNVV

SEQ ID NO: 130856 - protein, 10 aa, synthetic construct
NWYRGDRNVV

SEQ ID NO: 130857 - protein, 10 aa, synthetic construct
NWNRGDRNVV

SEQ ID NO: 130858 - protein, 10 aa, synthetic construct
NWQRGDRNVV

SEQ ID NO: 130859 - protein, 10 aa, synthetic construct
NWDRGDRNVV

SEQ ID NO: 130860 - protein, 10 aa, synthetic construct
NWERGDRNVV

SEQ ID NO: 130861 - protein, 10 aa, synthetic construct
NFGRGDRNVV

SEQ ID NO: 130862 - protein, 10 aa, synthetic construct
NFARGDRNVV

SEQ ID NO: 130863 - protein, 10 aa, synthetic construct
NFVRGDRNVV

SEQ ID NO: 130864 - protein, 10 aa, synthetic construct
NFPRGDRNVV

SEQ ID NO: 130865 - protein, 10 aa, synthetic construct
NFLRGDRNVV

SEQ ID NO: 130866 - protein, 10 aa, synthetic construct
NFIRGDRNVV

SEQ ID NO: 130867 - protein, 10 aa, synthetic construct
NFMRGDRNVV

SEQ ID NO: 130868 - protein, 10 aa, synthetic construct
NFWRGDRNVV

SEQ ID NO: 130869 - protein, 10 aa, synthetic construct
NFFRGDRNVV

SEQ ID NO: 130870 - protein, 10 aa, synthetic construct
NFKRGDRNVV

SEQ ID NO: 130871 - protein, 10 aa, synthetic construct
NFRRGDRNVV

SEQ ID NO: 130872 - protein, 10 aa, synthetic construct
NFHRGDRNVV

SEQ ID NO: 130873 - protein, 10 aa, synthetic construct
NFSRGDRNVV

SEQ ID NO: 130874 - protein, 10 aa, synthetic construct
NFTRGDRNVV

SEQ ID NO: 130875 - protein, 10 aa, synthetic construct
NFYRGDRNVV

SEQ ID NO: 130876 - protein, 10 aa, synthetic construct
NFNRGDRNVV

SEQ ID NO: 130877 - protein, 10 aa, synthetic construct
NFQRGDRNVV

SEQ ID NO: 130878 - protein, 10 aa, synthetic construct
NFDRGDRNVV

SEQ ID NO: 130879 - protein, 10 aa, synthetic construct
NFERGDRNVV

SEQ ID NO: 130880 - protein, 10 aa, synthetic construct
NKGRGDRNVV

SEQ ID NO: 130881 - protein, 10 aa, synthetic construct
NKARGDRNVV

SEQ ID NO: 130882 - protein, 10 aa, synthetic construct
NKVRGDRNVV

SEQ ID NO: 130883 - protein, 10 aa, synthetic construct
NKPRGDRNVV

SEQ ID NO: 130884 - protein, 10 aa, synthetic construct
NKLRGDRNVV

SEQ ID NO: 130885 - protein, 10 aa, synthetic construct
NKIRGDRNVV

SEQ ID NO: 130886 - protein, 10 aa, synthetic construct
NKMRGDRNVV

SEQ ID NO: 130887 - protein, 10 aa, synthetic construct
NKWRGDRNVV

SEQ ID NO: 130888 - protein, 10 aa, synthetic construct
NKFRGDRNVV

SEQ ID NO: 130889 - protein, 10 aa, synthetic construct
NKKRGDRNVV

SEQ ID NO: 130890 - protein, 10 aa, synthetic construct
NKRRGDRNVV

SEQ ID NO: 130891 - protein, 10 aa, synthetic construct
NKHRGDRNVV

SEQ ID NO: 130892 - protein, 10 aa, synthetic construct
NKSRGDRNVV

SEQ ID NO: 130893 - protein, 10 aa, synthetic construct
NKTRGDRNVV

SEQ ID NO: 130894 - protein, 10 aa, synthetic construct
NKYRGDRNVV

SEQ ID NO: 130895 - protein, 10 aa, synthetic construct
NKNRGDRNVV

SEQ ID NO: 130896 - protein, 10 aa, synthetic construct
NKQRGDRNVV

SEQ ID NO: 130897 - protein, 10 aa, synthetic construct
NKDRGDRNVV

SEQ ID NO: 130898 - protein, 10 aa, synthetic construct
NKERGDRNVV

SEQ ID NO: 130899 - protein, 10 aa, synthetic construct
NRGRGDRNVV

SEQ ID NO: 130900 - protein, 10 aa, synthetic construct
NRARGDRNVV

SEQ ID NO: 130901 - protein, 10 aa, synthetic construct
NRVRGDRNVV

SEQ ID NO: 130902 - protein, 10 aa, synthetic construct
NRPRGDRNVV

SEQ ID NO: 130903 - protein, 10 aa, synthetic construct
NRLRGDRNVV

SEQ ID NO: 130904 - protein, 10 aa, synthetic construct
NRIRGDRNVV

SEQ ID NO: 130905 - protein, 10 aa, synthetic construct
NRMRGDRNVV

SEQ ID NO: 130906 - protein, 10 aa, synthetic construct
NRWRGDRNVV

SEQ ID NO: 130907 - protein, 10 aa, synthetic construct
NRFRGDRNVV

SEQ ID NO: 130908 - protein, 10 aa, synthetic construct
NRKRGDRNVV

SEQ ID NO: 130909 - protein, 10 aa, synthetic construct
NRRRGDRNVV

SEQ ID NO: 130910 - protein, 10 aa, synthetic construct
NRHRGDRNVV

SEQ ID NO: 130911 - protein, 10 aa, synthetic construct
NRSRGDRNVV

SEQ ID NO: 130912 - protein, 10 aa, synthetic construct
NRTRGDRNVV

SEQ ID NO: 130913 - protein, 10 aa, synthetic construct
NRYRGDRNVV

SEQ ID NO: 130914 - protein, 10 aa, synthetic construct
NRNRGDRNVV

SEQ ID NO: 130915 - protein, 10 aa, synthetic construct
NRQRGDRNVV

SEQ ID NO: 130916 - protein, 10 aa, synthetic construct
NRDRGDRNVV

SEQ ID NO: 130917 - protein, 10 aa, synthetic construct
NRERGDRNVV

SEQ ID NO: 130918 - protein, 10 aa, synthetic construct
NHGRGDRNVV

SEQ ID NO: 130919 - protein, 10 aa, synthetic construct
NHARGDRNVV

SEQ ID NO: 130920 - protein, 10 aa, synthetic construct
NHVRGDRNVV

SEQ ID NO: 130921 - protein, 10 aa, synthetic construct
NHPRGDRNVV

SEQ ID NO: 130922 - protein, 10 aa, synthetic construct
NHLRGDRNVV

SEQ ID NO: 130923 - protein, 10 aa, synthetic construct
NHIRGDRNVV

SEQ ID NO: 130924 - protein, 10 aa, synthetic construct
NHMRGDRNVV

SEQ ID NO: 130925 - protein, 10 aa, synthetic construct
NHWRGDRNVV

SEQ ID NO: 130926 - protein, 10 aa, synthetic construct
NHFRGDRNVV

SEQ ID NO: 130927 - protein, 10 aa, synthetic construct
NHKRGDRNVV

SEQ ID NO: 130928 - protein, 10 aa, synthetic construct
NHRRGDRNVV

SEQ ID NO: 130929 - protein, 10 aa, synthetic construct
NHHRGDRNVV

SEQ ID NO: 130930 - protein, 10 aa, synthetic construct
NHSRGDRNVV

SEQ ID NO: 130931 - protein, 10 aa, synthetic construct
NHTRGDRNVV

SEQ ID NO: 130932 - protein, 10 aa, synthetic construct
NHYRGDRNVV

SEQ ID NO: 130933 - protein, 10 aa, synthetic construct
NHNRGDRNVV

SEQ ID NO: 130934 - protein, 10 aa, synthetic construct
NHQRGDRNVV

SEQ ID NO: 130935 - protein, 10 aa, synthetic construct
NHDRGDRNVV

SEQ ID NO: 130936 - protein, 10 aa, synthetic construct
NHERGDRNVV

SEQ ID NO: 130937 - protein, 10 aa, synthetic construct
NSGRGDRNVV

SEQ ID NO: 130938 - protein, 10 aa, synthetic construct
NSARGDRNVV

SEQ ID NO: 130939 - protein, 10 aa, synthetic construct
NSVRGDRNVV

SEQ ID NO: 130940 - protein, 10 aa, synthetic construct
NSPRGDRNVV

SEQ ID NO: 130941 - protein, 10 aa, synthetic construct
NSLRGDRNVV

SEQ ID NO: 130942 - protein, 10 aa, synthetic construct
NSIRGDRNVV

SEQ ID NO: 130943 - protein, 10 aa, synthetic construct
NSMRGDRNVV

SEQ ID NO: 130944 - protein, 10 aa, synthetic construct
NSWRGDRNVV

SEQ ID NO: 130945 - protein, 10 aa, synthetic construct
NSFRGDRNVV

SEQ ID NO: 130946 - protein, 10 aa, synthetic construct
NSKRGDRNVV

SEQ ID NO: 130947 - protein, 10 aa, synthetic construct
NSRRGDRNVV

SEQ ID NO: 130948 - protein, 10 aa, synthetic construct
NSHRGDRNVV

SEQ ID NO: 130949 - protein, 10 aa, synthetic construct
NSSRGDRNVV

SEQ ID NO: 130950 - protein, 10 aa, synthetic construct
NSTRGDRNVV

SEQ ID NO: 130951 - protein, 10 aa, synthetic construct
NSYRGDRNVV

SEQ ID NO: 130952 - protein, 10 aa, synthetic construct
NSNRGDRNVV

SEQ ID NO: 130953 - protein, 10 aa, synthetic construct
NSQRGDRNVV

SEQ ID NO: 130954 - protein, 10 aa, synthetic construct
NSDRGDRNVV

SEQ ID NO: 130955 - protein, 10 aa, synthetic construct
NSERGDRNVV

SEQ ID NO: 130956 - protein, 10 aa, synthetic construct
NTGRGDRNVV

SEQ ID NO: 130957 - protein, 10 aa, synthetic construct
NTARGDRNVV

SEQ ID NO: 130958 - protein, 10 aa, synthetic construct
NTVRGDRNVV

SEQ ID NO: 130959 - protein, 10 aa, synthetic construct
NTPRGDRNVV

SEQ ID NO: 130960 - protein, 10 aa, synthetic construct
NTLRGDRNVV

SEQ ID NO: 130961 - protein, 10 aa, synthetic construct
NTIRGDRNVV

SEQ ID NO: 130962 - protein, 10 aa, synthetic construct
NTMRGDRNVV

SEQ ID NO: 130963 - protein, 10 aa, synthetic construct
NTWRGDRNVV

SEQ ID NO: 130964 - protein, 10 aa, synthetic construct
NTFRGDRNVV

SEQ ID NO: 130965 - protein, 10 aa, synthetic construct
NTKRGDRNVV

SEQ ID NO: 130966 - protein, 10 aa, synthetic construct
NTRRGDRNVV

SEQ ID NO: 130967 - protein, 10 aa, synthetic construct
NTHRGDRNVV

SEQ ID NO: 130968 - protein, 10 aa, synthetic construct
NTSRGDRNVV

SEQ ID NO: 130969 - protein, 10 aa, synthetic construct
NTTRGDRNVV

SEQ ID NO: 130970 - protein, 10 aa, synthetic construct
NTYRGDRNVV

SEQ ID NO: 130971 - protein, 10 aa, synthetic construct
NTNRGDRNVV

SEQ ID NO: 130972 - protein, 10 aa, synthetic construct
NTQRGDRNVV

SEQ ID NO: 130973 - protein, 10 aa, synthetic construct
NTDRGDRNVV

SEQ ID NO: 130974 - protein, 10 aa, synthetic construct
NTERGDRNVV

SEQ ID NO: 130975 - protein, 10 aa, synthetic construct
NYGRGDRNVV

SEQ ID NO: 130976 - protein, 10 aa, synthetic construct
NYARGDRNVV

SEQ ID NO: 130977 - protein, 10 aa, synthetic construct
NYVRGDRNVV

SEQ ID NO: 130978 - protein, 10 aa, synthetic construct
NYPRGDRNVV

SEQ ID NO: 130979 - protein, 10 aa, synthetic construct
NYLRGDRNVV

SEQ ID NO: 130980 - protein, 10 aa, synthetic construct
NYIRGDRNVV

SEQ ID NO: 130981 - protein, 10 aa, synthetic construct
NYMRGDRNVV

SEQ ID NO: 130982 - protein, 10 aa, synthetic construct
NYWRGDRNVV

SEQ ID NO: 130983 - protein, 10 aa, synthetic construct
NYFRGDRNVV

SEQ ID NO: 130984 - protein, 10 aa, synthetic construct
NYKRGDRNVV

SEQ ID NO: 130985 - protein, 10 aa, synthetic construct
NYRRGDRNVV

SEQ ID NO: 130986 - protein, 10 aa, synthetic construct
NYHRGDRNVV

SEQ ID NO: 130987 - protein, 10 aa, synthetic construct
NYSRGDRNVV

SEQ ID NO: 130988 - protein, 10 aa, synthetic construct
NYTRGDRNVV

SEQ ID NO: 130989 - protein, 10 aa, synthetic construct
NYYRGDRNVV

SEQ ID NO: 130990 - protein, 10 aa, synthetic construct
NYNRGDRNVV

SEQ ID NO: 130991 - protein, 10 aa, synthetic construct
NYQRGDRNVV

SEQ ID NO: 130992 - protein, 10 aa, synthetic construct
NYDRGDRNVV

SEQ ID NO: 130993 - protein, 10 aa, synthetic construct
NYERGDRNVV

SEQ ID NO: 130994 - protein, 10 aa, synthetic construct
NNGRGDRNVV

SEQ ID NO: 130995 - protein, 10 aa, synthetic construct
NNARGDRNVV

SEQ ID NO: 130996 - protein, 10 aa, synthetic construct
NNVRGDRNVV

SEQ ID NO: 130997 - protein, 10 aa, synthetic construct
NNPRGDRNVV

SEQ ID NO: 130998 - protein, 10 aa, synthetic construct
NNLRGDRNVV

SEQ ID NO: 130999 - protein, 10 aa, synthetic construct
NNIRGDRNVV

SEQ ID NO: 131000 - protein, 10 aa, synthetic construct
NNMRGDRNVV

SEQ ID NO: 131001 - protein, 10 aa, synthetic construct
NNWRGDRNVV

SEQ ID NO: 131002 - protein, 10 aa, synthetic construct
NNFRGDRNVV

SEQ ID NO: 131003 - protein, 10 aa, synthetic construct
NNKRGDRNVV

SEQ ID NO: 131004 - protein, 10 aa, synthetic construct
NNRRGDRNVV

SEQ ID NO: 131005 - protein, 10 aa, synthetic construct
NNHRGDRNVV

SEQ ID NO: 131006 - protein, 10 aa, synthetic construct
NNSRGDRNVV

SEQ ID NO: 131007 - protein, 10 aa, synthetic construct
NNTRGDRNVV

SEQ ID NO: 131008 - protein, 10 aa, synthetic construct
NNYRGDRNVV

SEQ ID NO: 131009 - protein, 10 aa, synthetic construct
NNNRGDRNVV

SEQ ID NO: 131010 - protein, 10 aa, synthetic construct
NNQRGDRNVV

SEQ ID NO: 131011 - protein, 10 aa, synthetic construct
NNDRGDRNVV

SEQ ID NO: 131012 - protein, 10 aa, synthetic construct
NNERGDRNVV

SEQ ID NO: 131013 - protein, 10 aa, synthetic construct
NQGRGDRNVV

SEQ ID NO: 131014 - protein, 10 aa, synthetic construct
NQARGDRNVV

SEQ ID NO: 131015 - protein, 10 aa, synthetic construct
NQVRGDRNVV

SEQ ID NO: 131016 - protein, 10 aa, synthetic construct
NQPRGDRNVV

SEQ ID NO: 131017 - protein, 10 aa, synthetic construct
NQLRGDRNVV

SEQ ID NO: 131018 - protein, 10 aa, synthetic construct
NQIRGDRNVV

SEQ ID NO: 131019 - protein, 10 aa, synthetic construct
NQMRGDRNVV

SEQ ID NO: 131020 - protein, 10 aa, synthetic construct
NQWRGDRNVV

SEQ ID NO: 131021 - protein, 10 aa, synthetic construct
NQFRGDRNVV

SEQ ID NO: 131022 - protein, 10 aa, synthetic construct
NQKRGDRNVV

SEQ ID NO: 131023 - protein, 10 aa, synthetic construct
NQRRGDRNVV

SEQ ID NO: 131024 - protein, 10 aa, synthetic construct
NQHRGDRNVV

SEQ ID NO: 131025 - protein, 10 aa, synthetic construct
NQSRGDRNVV

SEQ ID NO: 131026 - protein, 10 aa, synthetic construct
NQTRGDRNVV

SEQ ID NO: 131027 - protein, 10 aa, synthetic construct
NQYRGDRNVV

SEQ ID NO: 131028 - protein, 10 aa, synthetic construct
NQNRGDRNVV

SEQ ID NO: 131029 - protein, 10 aa, synthetic construct
NQQRGDRNVV

SEQ ID NO: 131030 - protein, 10 aa, synthetic construct
NQDRGDRNVV

SEQ ID NO: 131031 - protein, 10 aa, synthetic construct
NQERGDRNVV

SEQ ID NO: 131032 - protein, 10 aa, synthetic construct
NDGRGDRNVV

SEQ ID NO: 131033 - protein, 10 aa, synthetic construct
NDARGDRNVV

SEQ ID NO: 131034 - protein, 10 aa, synthetic construct
NDVRGDRNVV

SEQ ID NO: 131035 - protein, 10 aa, synthetic construct
NDPRGDRNVV

SEQ ID NO: 131036 - protein, 10 aa, synthetic construct
NDLRGDRNVV

SEQ ID NO: 131037 - protein, 10 aa, synthetic construct
NDIRGDRNVV

SEQ ID NO: 131038 - protein, 10 aa, synthetic construct
NDMRGDRNVV

SEQ ID NO: 131039 - protein, 10 aa, synthetic construct
NDWRGDRNVV

SEQ ID NO: 131040 - protein, 10 aa, synthetic construct
NDFRGDRNVV

SEQ ID NO: 131041 - protein, 10 aa, synthetic construct
NDKRGDRNVV

SEQ ID NO: 131042 - protein, 10 aa, synthetic construct
NDRRGDRNVV

SEQ ID NO: 131043 - protein, 10 aa, synthetic construct
NDHRGDRNVV

SEQ ID NO: 131044 - protein, 10 aa, synthetic construct
NDSRGDRNVV

SEQ ID NO: 131045 - protein, 10 aa, synthetic construct
NDTRGDRNVV

SEQ ID NO: 131046 - protein, 10 aa, synthetic construct
NDYRGDRNVV

SEQ ID NO: 131047 - protein, 10 aa, synthetic construct
NDNRGDRNVV

SEQ ID NO: 131048 - protein, 10 aa, synthetic construct
NDQRGDRNVV

SEQ ID NO: 131049 - protein, 10 aa, synthetic construct
NDDRGDRNVV

SEQ ID NO: 131050 - protein, 10 aa, synthetic construct
NDERGDRNVV

SEQ ID NO: 131051 - protein, 10 aa, synthetic construct
NEGRGDRNVV

SEQ ID NO: 131052 - protein, 10 aa, synthetic construct
NEARGDRNVV

SEQ ID NO: 131053 - protein, 10 aa, synthetic construct
NEVRGDRNVV

SEQ ID NO: 131054 - protein, 10 aa, synthetic construct
NEPRGDRNVV

SEQ ID NO: 131055 - protein, 10 aa, synthetic construct
NELRGDRNVV

SEQ ID NO: 131056 - protein, 10 aa, synthetic construct
NEIRGDRNVV

SEQ ID NO: 131057 - protein, 10 aa, synthetic construct
NEMRGDRNVV

SEQ ID NO: 131058 - protein, 10 aa, synthetic construct
NEWRGDRNVV

SEQ ID NO: 131059 - protein, 10 aa, synthetic construct
NEFRGDRNVV

SEQ ID NO: 131060 - protein, 10 aa, synthetic construct
NEKRGDRNVV

SEQ ID NO: 131061 - protein, 10 aa, synthetic construct
NERRGDRNVV

SEQ ID NO: 131062 - protein, 10 aa, synthetic construct
NEHRGDRNVV

SEQ ID NO: 131063 - protein, 10 aa, synthetic construct
NESRGDRNVV

SEQ ID NO: 131064 - protein, 10 aa, synthetic construct
NETRGDRNVV

SEQ ID NO: 131065 - protein, 10 aa, synthetic construct
NEYRGDRNVV

SEQ ID NO: 131066 - protein, 10 aa, synthetic construct
NENRGDRNVV

SEQ ID NO: 131067 - protein, 10 aa, synthetic construct
NEQRGDRNVV

SEQ ID NO: 131068 - protein, 10 aa, synthetic construct
NEDRGDRNVV

SEQ ID NO: 131069 - protein, 10 aa, synthetic construct
NEERGDRNVV

SEQ ID NO: 131070 - protein, 10 aa, synthetic construct
DGGRGDRNVV

SEQ ID NO: 131071 - protein, 10 aa, synthetic construct
DGARGDRNVV

SEQ ID NO: 131072 - protein, 10 aa, synthetic construct
DGVRGDRNVV

SEQ ID NO: 131073 - protein, 10 aa, synthetic construct
DGPRGDRNVV

SEQ ID NO: 131074 - protein, 10 aa, synthetic construct
DGLRGDRNVV

SEQ ID NO: 131075 - protein, 10 aa, synthetic construct
DGIRGDRNVV

SEQ ID NO: 131076 - protein, 10 aa, synthetic construct
DGMRGDRNVV

SEQ ID NO: 131077 - protein, 10 aa, synthetic construct
DGWRGDRNVV

SEQ ID NO: 131078 - protein, 10 aa, synthetic construct
DGFRGDRNVV

SEQ ID NO: 131079 - protein, 10 aa, synthetic construct
DGKRGDRNVV

SEQ ID NO: 131080 - protein, 10 aa, synthetic construct
DGRRGDRNVV

SEQ ID NO: 131081 - protein, 10 aa, synthetic construct
DGHRGDRNVV

SEQ ID NO: 131082 - protein, 10 aa, synthetic construct
DGSRGDRNVV

SEQ ID NO: 131083 - protein, 10 aa, synthetic construct
DGTRGDRNVV

SEQ ID NO: 131084 - protein, 10 aa, synthetic construct
DGYRGDRNVV

SEQ ID NO: 131085 - protein, 10 aa, synthetic construct
DGNRGDRNVV

SEQ ID NO: 131086 - protein, 10 aa, synthetic construct
DGQRGDRNVV

SEQ ID NO: 131087 - protein, 10 aa, synthetic construct
DGDRGDRNVV

SEQ ID NO: 131088 - protein, 10 aa, synthetic construct
DGERGDRNVV

SEQ ID NO: 131089 - protein, 10 aa, synthetic construct
DAGRGDRNVV

SEQ ID NO: 131090 - protein, 10 aa, synthetic construct
DAARGDRNVV

SEQ ID NO: 131091 - protein, 10 aa, synthetic construct
DAVRGDRNVV

SEQ ID NO: 131092 - protein, 10 aa, synthetic construct
DAPRGDRNVV

SEQ ID NO: 131093 - protein, 10 aa, synthetic construct
DALRGDRNVV

SEQ ID NO: 131094 - protein, 10 aa, synthetic construct
DAIRGDRNVV

SEQ ID NO: 131095 - protein, 10 aa, synthetic construct
DAMRGDRNVV

SEQ ID NO: 131096 - protein, 10 aa, synthetic construct
DAWRGDRNVV

SEQ ID NO: 131097 - protein, 10 aa, synthetic construct
DAFRGDRNVV

SEQ ID NO: 131098 - protein, 10 aa, synthetic construct
DAKRGDRNVV

SEQ ID NO: 131099 - protein, 10 aa, synthetic construct
DARRGDRNVV

SEQ ID NO: 131100 - protein, 10 aa, synthetic construct
DAHRGDRNVV

SEQ ID NO: 131101 - protein, 10 aa, synthetic construct
DASRGDRNVV

SEQ ID NO: 131102 - protein, 10 aa, synthetic construct
DATRGDRNVV

SEQ ID NO: 131103 - protein, 10 aa, synthetic construct
DAYRGDRNVV

SEQ ID NO: 131104 - protein, 10 aa, synthetic construct
DANRGDRNVV

SEQ ID NO: 131105 - protein, 10 aa, synthetic construct
DAQRGDRNVV

SEQ ID NO: 131106 - protein, 10 aa, synthetic construct
DADRGDRNVV

SEQ ID NO: 131107 - protein, 10 aa, synthetic construct
DAERGDRNVV

SEQ ID NO: 131108 - protein, 10 aa, synthetic construct
DVGRGDRNVV

SEQ ID NO: 131109 - protein, 10 aa, synthetic construct
DVARGDRNVV

SEQ ID NO: 131110 - protein, 10 aa, synthetic construct
DVVRGDRNVV

SEQ ID NO: 131111 - protein, 10 aa, synthetic construct
DVPRGDRNVV

SEQ ID NO: 131112 - protein, 10 aa, synthetic construct
DVLRGDRNVV

SEQ ID NO: 131113 - protein, 10 aa, synthetic construct
DVIRGDRNVV

SEQ ID NO: 131114 - protein, 10 aa, synthetic construct
DVMRGDRNVV

SEQ ID NO: 131115 - protein, 10 aa, synthetic construct
DVWRGDRNVV

SEQ ID NO: 131116 - protein, 10 aa, synthetic construct
DVFRGDRNVV

SEQ ID NO: 131117 - protein, 10 aa, synthetic construct
DVKRGDRNVV

SEQ ID NO: 131118 - protein, 10 aa, synthetic construct
DVRRGDRNVV

SEQ ID NO: 131119 - protein, 10 aa, synthetic construct
DVHRGDRNVV

SEQ ID NO: 131120 - protein, 10 aa, synthetic construct
DVSRGDRNVV

SEQ ID NO: 131121 - protein, 10 aa, synthetic construct
DVTRGDRNVV

SEQ ID NO: 131122 - protein, 10 aa, synthetic construct
DVYRGDRNVV

SEQ ID NO: 131123 - protein, 10 aa, synthetic construct
DVNRGDRNVV

SEQ ID NO: 131124 - protein, 10 aa, synthetic construct
DVQRGDRNVV

SEQ ID NO: 131125 - protein, 10 aa, synthetic construct
DVDRGDRNVV

SEQ ID NO: 131126 - protein, 10 aa, synthetic construct
DVERGDRNVV

SEQ ID NO: 131127 - protein, 10 aa, synthetic construct
DPGRGDRNVV

SEQ ID NO: 131128 - protein, 10 aa, synthetic construct
DPARGDRNVV

SEQ ID NO: 131129 - protein, 10 aa, synthetic construct
DPVRGDRNVV

SEQ ID NO: 131130 - protein, 10 aa, synthetic construct
DPPRGDRNVV

SEQ ID NO: 131131 - protein, 10 aa, synthetic construct
DPLRGDRNVV

SEQ ID NO: 131132 - protein, 10 aa, synthetic construct
DPIRGDRNVV

SEQ ID NO: 131133 - protein, 10 aa, synthetic construct
DPMRGDRNVV

SEQ ID NO: 131134 - protein, 10 aa, synthetic construct
DPWRGDRNVV

SEQ ID NO: 131135 - protein, 10 aa, synthetic construct
DPFRGDRNVV

SEQ ID NO: 131136 - protein, 10 aa, synthetic construct
DPKRGDRNVV

SEQ ID NO: 131137 - protein, 10 aa, synthetic construct
DPRRGDRNVV

SEQ ID NO: 131138 - protein, 10 aa, synthetic construct
DPHRGDRNVV

SEQ ID NO: 131139 - protein, 10 aa, synthetic construct
DPSRGDRNVV

SEQ ID NO: 131140 - protein, 10 aa, synthetic construct
DPTRGDRNVV

SEQ ID NO: 131141 - protein, 10 aa, synthetic construct
DPYRGDRNVV

SEQ ID NO: 131142 - protein, 10 aa, synthetic construct
DPNRGDRNVV

SEQ ID NO: 131143 - protein, 10 aa, synthetic construct
DPQRGDRNVV

SEQ ID NO: 131144 - protein, 10 aa, synthetic construct
DPDRGDRNVV

SEQ ID NO: 131145 - protein, 10 aa, synthetic construct
DPERGDRNVV

SEQ ID NO: 131146 - protein, 10 aa, synthetic construct
DLGRGDRNVV

SEQ ID NO: 131147 - protein, 10 aa, synthetic construct
DLARGDRNVV

SEQ ID NO: 131148 - protein, 10 aa, synthetic construct
DLVRGDRNVV

SEQ ID NO: 131149 - protein, 10 aa, synthetic construct
DLPRGDRNVV

SEQ ID NO: 131150 - protein, 10 aa, synthetic construct
DLLRGDRNVV

SEQ ID NO: 131151 - protein, 10 aa, synthetic construct
DLIRGDRNVV

SEQ ID NO: 131152 - protein, 10 aa, synthetic construct
DLMRGDRNVV

SEQ ID NO: 131153 - protein, 10 aa, synthetic construct
DLWRGDRNVV

SEQ ID NO: 131154 - protein, 10 aa, synthetic construct
DLFRGDRNVV

SEQ ID NO: 131155 - protein, 10 aa, synthetic construct
DLKRGDRNVV

SEQ ID NO: 131156 - protein, 10 aa, synthetic construct
DLRRGDRNVV

SEQ ID NO: 131157 - protein, 10 aa, synthetic construct
DLHRGDRNVV

SEQ ID NO: 131158 - protein, 10 aa, synthetic construct
DLSRGDRNVV

SEQ ID NO: 131159 - protein, 10 aa, synthetic construct
DLTRGDRNVV

SEQ ID NO: 131160 - protein, 10 aa, synthetic construct
DLYRGDRNVV

SEQ ID NO: 131161 - protein, 10 aa, synthetic construct
DLNRGDRNVV

SEQ ID NO: 131162 - protein, 10 aa, synthetic construct
DLQRGDRNVV

SEQ ID NO: 131163 - protein, 10 aa, synthetic construct
DLDRGDRNVV

SEQ ID NO: 131164 - protein, 10 aa, synthetic construct
DLERGDRNVV

SEQ ID NO: 131165 - protein, 10 aa, synthetic construct
DIGRGDRNVV

SEQ ID NO: 131166 - protein, 10 aa, synthetic construct
DIARGDRNVV

SEQ ID NO: 131167 - protein, 10 aa, synthetic construct
DIVRGDRNVV

SEQ ID NO: 131168 - protein, 10 aa, synthetic construct
DIPRGDRNVV

SEQ ID NO: 131169 - protein, 10 aa, synthetic construct
DILRGDRNVV

SEQ ID NO: 131170 - protein, 10 aa, synthetic construct
DIIRGDRNVV

SEQ ID NO: 131171 - protein, 10 aa, synthetic construct
DIMRGDRNVV

SEQ ID NO: 131172 - protein, 10 aa, synthetic construct
DIWRGDRNVV

SEQ ID NO: 131173 - protein, 10 aa, synthetic construct
DIFRGDRNVV

SEQ ID NO: 131174 - protein, 10 aa, synthetic construct
DIKRGDRNVV

SEQ ID NO: 131175 - protein, 10 aa, synthetic construct
DIRRGDRNVV

SEQ ID NO: 131176 - protein, 10 aa, synthetic construct
DIHRGDRNVV

SEQ ID NO: 131177 - protein, 10 aa, synthetic construct
DISRGDRNVV

SEQ ID NO: 131178 - protein, 10 aa, synthetic construct
DITRGDRNVV

SEQ ID NO: 131179 - protein, 10 aa, synthetic construct
DIYRGDRNVV

SEQ ID NO: 131180 - protein, 10 aa, synthetic construct
DINRGDRNVV

SEQ ID NO: 131181 - protein, 10 aa, synthetic construct
DIQRGDRNVV

SEQ ID NO: 131182 - protein, 10 aa, synthetic construct
DIDRGDRNVV

SEQ ID NO: 131183 - protein, 10 aa, synthetic construct
DIERGDRNVV

SEQ ID NO: 131184 - protein, 10 aa, synthetic construct
DMGRGDRNVV

SEQ ID NO: 131185 - protein, 10 aa, synthetic construct
DMARGDRNVV

SEQ ID NO: 131186 - protein, 10 aa, synthetic construct
DMVRGDRNVV

SEQ ID NO: 131187 - protein, 10 aa, synthetic construct
DMPRGDRNVV

SEQ ID NO: 131188 - protein, 10 aa, synthetic construct
DMLRGDRNVV

SEQ ID NO: 131189 - protein, 10 aa, synthetic construct
DMIRGDRNVV

SEQ ID NO: 131190 - protein, 10 aa, synthetic construct
DMMRGDRNVV

SEQ ID NO: 131191 - protein, 10 aa, synthetic construct
DMWRGDRNVV

SEQ ID NO: 131192 - protein, 10 aa, synthetic construct
DMFRGDRNVV

SEQ ID NO: 131193 - protein, 10 aa, synthetic construct
DMKRGDRNVV

SEQ ID NO: 131194 - protein, 10 aa, synthetic construct
DMRRGDRNVV

SEQ ID NO: 131195 - protein, 10 aa, synthetic construct
DMHRGDRNVV

SEQ ID NO: 131196 - protein, 10 aa, synthetic construct
DMSRGDRNVV

SEQ ID NO: 131197 - protein, 10 aa, synthetic construct
DMTRGDRNVV

SEQ ID NO: 131198 - protein, 10 aa, synthetic construct
DMYRGDRNVV

SEQ ID NO: 131199 - protein, 10 aa, synthetic construct
DMNRGDRNVV

SEQ ID NO: 131200 - protein, 10 aa, synthetic construct
DMQRGDRNVV

SEQ ID NO: 131201 - protein, 10 aa, synthetic construct
DMDRGDRNVV

SEQ ID NO: 131202 - protein, 10 aa, synthetic construct
DMERGDRNVV

SEQ ID NO: 131203 - protein, 10 aa, synthetic construct
DWGRGDRNVV

SEQ ID NO: 131204 - protein, 10 aa, synthetic construct
DWARGDRNVV

SEQ ID NO: 131205 - protein, 10 aa, synthetic construct
DWVRGDRNVV

SEQ ID NO: 131206 - protein, 10 aa, synthetic construct
DWPRGDRNVV

SEQ ID NO: 131207 - protein, 10 aa, synthetic construct
DWLRGDRNVV

SEQ ID NO: 131208 - protein, 10 aa, synthetic construct
DWIRGDRNVV

SEQ ID NO: 131209 - protein, 10 aa, synthetic construct
DWMRGDRNVV

SEQ ID NO: 131210 - protein, 10 aa, synthetic construct
DWWRGDRNVV

SEQ ID NO: 131211 - protein, 10 aa, synthetic construct
DWFRGDRNVV

SEQ ID NO: 131212 - protein, 10 aa, synthetic construct
DWKRGDRNVV

SEQ ID NO: 131213 - protein, 10 aa, synthetic construct
DWRRGDRNVV

SEQ ID NO: 131214 - protein, 10 aa, synthetic construct
DWHRGDRNVV

SEQ ID NO: 131215 - protein, 10 aa, synthetic construct
DWSRGDRNVV

SEQ ID NO: 131216 - protein, 10 aa, synthetic construct
DWTRGDRNVV

SEQ ID NO: 131217 - protein, 10 aa, synthetic construct
DWYRGDRNVV

SEQ ID NO: 131218 - protein, 10 aa, synthetic construct
DWNRGDRNVV

SEQ ID NO: 131219 - protein, 10 aa, synthetic construct
DWQRGDRNVV

SEQ ID NO: 131220 - protein, 10 aa, synthetic construct
DWDRGDRNVV

SEQ ID NO: 131221 - protein, 10 aa, synthetic construct
DWERGDRNVV

SEQ ID NO: 131222 - protein, 10 aa, synthetic construct
DFGRGDRNVV

SEQ ID NO: 131223 - protein, 10 aa, synthetic construct
DFARGDRNVV

SEQ ID NO: 131224 - protein, 10 aa, synthetic construct
DFVRGDRNVV

SEQ ID NO: 131225 - protein, 10 aa, synthetic construct
DFPRGDRNVV

SEQ ID NO: 131226 - protein, 10 aa, synthetic construct
DFLRGDRNVV

SEQ ID NO: 131227 - protein, 10 aa, synthetic construct
DFIRGDRNVV

SEQ ID NO: 131228 - protein, 10 aa, synthetic construct
DFMRGDRNVV

SEQ ID NO: 131229 - protein, 10 aa, synthetic construct
DFWRGDRNVV

SEQ ID NO: 131230 - protein, 10 aa, synthetic construct
DFFRGDRNVV

SEQ ID NO: 131231 - protein, 10 aa, synthetic construct
DFKRGDRNVV

SEQ ID NO: 131232 - protein, 10 aa, synthetic construct
DFRRGDRNVV

SEQ ID NO: 131233 - protein, 10 aa, synthetic construct
DFHRGDRNVV

SEQ ID NO: 131234 - protein, 10 aa, synthetic construct
DFSRGDRNVV

SEQ ID NO: 131235 - protein, 10 aa, synthetic construct
DFTRGDRNVV

SEQ ID NO: 131236 - protein, 10 aa, synthetic construct
DFYRGDRNVV

SEQ ID NO: 131237 - protein, 10 aa, synthetic construct
DFNRGDRNVV

SEQ ID NO: 131238 - protein, 10 aa, synthetic construct
DFQRGDRNVV

SEQ ID NO: 131239 - protein, 10 aa, synthetic construct
DFDRGDRNVV

SEQ ID NO: 131240 - protein, 10 aa, synthetic construct
DFERGDRNVV

SEQ ID NO: 131241 - protein, 10 aa, synthetic construct
DKGRGDRNVV

SEQ ID NO: 131242 - protein, 10 aa, synthetic construct
DKARGDRNVV

SEQ ID NO: 131243 - protein, 10 aa, synthetic construct
DKVRGDRNVV

SEQ ID NO: 131244 - protein, 10 aa, synthetic construct
DKPRGDRNVV

SEQ ID NO: 131245 - protein, 10 aa, synthetic construct
DKLRGDRNVV

SEQ ID NO: 131246 - protein, 10 aa, synthetic construct
DKIRGDRNVV

SEQ ID NO: 131247 - protein, 10 aa, synthetic construct
DKMRGDRNVV

SEQ ID NO: 131248 - protein, 10 aa, synthetic construct
DKWRGDRNVV

SEQ ID NO: 131249 - protein, 10 aa, synthetic construct
DKFRGDRNVV

SEQ ID NO: 131250 - protein, 10 aa, synthetic construct
DKKRGDRNVV

SEQ ID NO: 131251 - protein, 10 aa, synthetic construct
DKRRGDRNVV

SEQ ID NO: 131252 - protein, 10 aa, synthetic construct
DKHRGDRNVV

SEQ ID NO: 131253 - protein, 10 aa, synthetic construct
DKSRGDRNVV

SEQ ID NO: 131254 - protein, 10 aa, synthetic construct
DKTRGDRNVV

SEQ ID NO: 131255 - protein, 10 aa, synthetic construct
DKYRGDRNVV

SEQ ID NO: 131256 - protein, 10 aa, synthetic construct
DKNRGDRNVV

SEQ ID NO: 131257 - protein, 10 aa, synthetic construct
DKQRGDRNVV

SEQ ID NO: 131258 - protein, 10 aa, synthetic construct
DKDRGDRNVV

SEQ ID NO: 131259 - protein, 10 aa, synthetic construct
DKERGDRNVV

SEQ ID NO: 131260 - protein, 10 aa, synthetic construct
DRGRGDRNVV

SEQ ID NO: 131261 - protein, 10 aa, synthetic construct
DRARGDRNVV

SEQ ID NO: 131262 - protein, 10 aa, synthetic construct
DRVRGDRNVV

SEQ ID NO: 131263 - protein, 10 aa, synthetic construct
DRPRGDRNVV

SEQ ID NO: 131264 - protein, 10 aa, synthetic construct
DRLRGDRNVV

SEQ ID NO: 131265 - protein, 10 aa, synthetic construct
DRIRGDRNVV

SEQ ID NO: 131266 - protein, 10 aa, synthetic construct
DRMRGDRNVV

SEQ ID NO: 131267 - protein, 10 aa, synthetic construct
DRWRGDRNVV

SEQ ID NO: 131268 - protein, 10 aa, synthetic construct
DRFRGDRNVV

SEQ ID NO: 131269 - protein, 10 aa, synthetic construct
DRKRGDRNVV

SEQ ID NO: 131270 - protein, 10 aa, synthetic construct
DRRRGDRNVV

SEQ ID NO: 131271 - protein, 10 aa, synthetic construct
DRHRGDRNVV

SEQ ID NO: 131272 - protein, 10 aa, synthetic construct
DRSRGDRNVV

SEQ ID NO: 131273 - protein, 10 aa, synthetic construct
DRTRGDRNVV

SEQ ID NO: 131274 - protein, 10 aa, synthetic construct
DRYRGDRNVV

SEQ ID NO: 131275 - protein, 10 aa, synthetic construct
DRNRGDRNVV

SEQ ID NO: 131276 - protein, 10 aa, synthetic construct
DRQRGDRNVV

SEQ ID NO: 131277 - protein, 10 aa, synthetic construct
DRDRGDRNVV

SEQ ID NO: 131278 - protein, 10 aa, synthetic construct
DRERGDRNVV

SEQ ID NO: 131279 - protein, 10 aa, synthetic construct
DHGRGDRNVV

SEQ ID NO: 131280 - protein, 10 aa, synthetic construct
DHARGDRNVV

SEQ ID NO: 131281 - protein, 10 aa, synthetic construct
DHVRGDRNVV

SEQ ID NO: 131282 - protein, 10 aa, synthetic construct
DHPRGDRNVV

SEQ ID NO: 131283 - protein, 10 aa, synthetic construct
DHLRGDRNVV

SEQ ID NO: 131284 - protein, 10 aa, synthetic construct
DHIRGDRNVV

SEQ ID NO: 131285 - protein, 10 aa, synthetic construct
DHMRGDRNVV

SEQ ID NO: 131286 - protein, 10 aa, synthetic construct
DHWRGDRNVV

SEQ ID NO: 131287 - protein, 10 aa, synthetic construct
DHFRGDRNVV

SEQ ID NO: 131288 - protein, 10 aa, synthetic construct
DHKRGDRNVV

SEQ ID NO: 131289 - protein, 10 aa, synthetic construct
DHRRGDRNVV

SEQ ID NO: 131290 - protein, 10 aa, synthetic construct
DHHRGDRNVV

SEQ ID NO: 131291 - protein, 10 aa, synthetic construct
DHSRGDRNVV

SEQ ID NO: 131292 - protein, 10 aa, synthetic construct
DHTRGDRNVV

SEQ ID NO: 131293 - protein, 10 aa, synthetic construct
DHYRGDRNVV

SEQ ID NO: 131294 - protein, 10 aa, synthetic construct
DHNRGDRNVV

SEQ ID NO: 131295 - protein, 10 aa, synthetic construct
DHQRGDRNVV

SEQ ID NO: 131296 - protein, 10 aa, synthetic construct
DHDRGDRNVV

SEQ ID NO: 131297 - protein, 10 aa, synthetic construct
DHERGDRNVV

SEQ ID NO: 131298 - protein, 10 aa, synthetic construct
DSGRGDRNVV

SEQ ID NO: 131299 - protein, 10 aa, synthetic construct
DSARGDRNVV

SEQ ID NO: 131300 - protein, 10 aa, synthetic construct
DSVRGDRNVV

SEQ ID NO: 131301 - protein, 10 aa, synthetic construct
DSPRGDRNVV

SEQ ID NO: 131302 - protein, 10 aa, synthetic construct
DSLRGDRNVV

SEQ ID NO: 131303 - protein, 10 aa, synthetic construct
DSIRGDRNVV

SEQ ID NO: 131304 - protein, 10 aa, synthetic construct
DSMRGDRNVV

SEQ ID NO: 131305 - protein, 10 aa, synthetic construct
DSWRGDRNVV

SEQ ID NO: 131306 - protein, 10 aa, synthetic construct
DSFRGDRNVV

SEQ ID NO: 131307 - protein, 10 aa, synthetic construct
DSKRGDRNVV

SEQ ID NO: 131308 - protein, 10 aa, synthetic construct
DSRRGDRNVV

SEQ ID NO: 131309 - protein, 10 aa, synthetic construct
DSHRGDRNVV

SEQ ID NO: 131310 - protein, 10 aa, synthetic construct
DSSRGDRNVV

SEQ ID NO: 131311 - protein, 10 aa, synthetic construct
DSTRGDRNVV

SEQ ID NO: 131312 - protein, 10 aa, synthetic construct
DSYRGDRNVV

SEQ ID NO: 131313 - protein, 10 aa, synthetic construct
DSNRGDRNVV

SEQ ID NO: 131314 - protein, 10 aa, synthetic construct
DSQRGDRNVV

SEQ ID NO: 131315 - protein, 10 aa, synthetic construct
DSDRGDRNVV

SEQ ID NO: 131316 - protein, 10 aa, synthetic construct
DSERGDRNVV

SEQ ID NO: 131317 - protein, 10 aa, synthetic construct
DTGRGDRNVV

SEQ ID NO: 131318 - protein, 10 aa, synthetic construct
DTARGDRNVV

SEQ ID NO: 131319 - protein, 10 aa, synthetic construct
DTVRGDRNVV

SEQ ID NO: 131320 - protein, 10 aa, synthetic construct
DTPRGDRNVV

SEQ ID NO: 131321 - protein, 10 aa, synthetic construct
DTLRGDRNVV

SEQ ID NO: 131322 - protein, 10 aa, synthetic construct
DTIRGDRNVV

SEQ ID NO: 131323 - protein, 10 aa, synthetic construct
DTMRGDRNVV

SEQ ID NO: 131324 - protein, 10 aa, synthetic construct
DTWRGDRNVV

SEQ ID NO: 131325 - protein, 10 aa, synthetic construct
DTFRGDRNVV

SEQ ID NO: 131326 - protein, 10 aa, synthetic construct
DTKRGDRNVV

SEQ ID NO: 131327 - protein, 10 aa, synthetic construct
DTRRGDRNVV

SEQ ID NO: 131328 - protein, 10 aa, synthetic construct
DTHRGDRNVV

SEQ ID NO: 131329 - protein, 10 aa, synthetic construct
DTSRGDRNVV

SEQ ID NO: 131330 - protein, 10 aa, synthetic construct
DTTRGDRNVV

SEQ ID NO: 131331 - protein, 10 aa, synthetic construct
DTYRGDRNVV

SEQ ID NO: 131332 - protein, 10 aa, synthetic construct
DTNRGDRNVV

SEQ ID NO: 131333 - protein, 10 aa, synthetic construct
DTQRGDRNVV

SEQ ID NO: 131334 - protein, 10 aa, synthetic construct
DTDRGDRNVV

SEQ ID NO: 131335 - protein, 10 aa, synthetic construct
DTERGDRNVV

SEQ ID NO: 131336 - protein, 10 aa, synthetic construct
DYGRGDRNVV

SEQ ID NO: 131337 - protein, 10 aa, synthetic construct
DYARGDRNVV

SEQ ID NO: 131338 - protein, 10 aa, synthetic construct
DYVRGDRNVV

SEQ ID NO: 131339 - protein, 10 aa, synthetic construct
DYPRGDRNVV

SEQ ID NO: 131340 - protein, 10 aa, synthetic construct
DYLRGDRNVV

SEQ ID NO: 131341 - protein, 10 aa, synthetic construct
DYIRGDRNVV

SEQ ID NO: 131342 - protein, 10 aa, synthetic construct
DYMRGDRNVV

SEQ ID NO: 131343 - protein, 10 aa, synthetic construct
DYWRGDRNVV

SEQ ID NO: 131344 - protein, 10 aa, synthetic construct
DYFRGDRNVV

SEQ ID NO: 131345 - protein, 10 aa, synthetic construct
DYKRGDRNVV

SEQ ID NO: 131346 - protein, 10 aa, synthetic construct
DYRRGDRNVV

SEQ ID NO: 131347 - protein, 10 aa, synthetic construct
DYHRGDRNVV

SEQ ID NO: 131348 - protein, 10 aa, synthetic construct
DYSRGDRNVV

SEQ ID NO: 131349 - protein, 10 aa, synthetic construct
DYTRGDRNVV

SEQ ID NO: 131350 - protein, 10 aa, synthetic construct
DYYRGDRNVV

SEQ ID NO: 131351 - protein, 10 aa, synthetic construct
DYNRGDRNVV

SEQ ID NO: 131352 - protein, 10 aa, synthetic construct
DYQRGDRNVV

SEQ ID NO: 131353 - protein, 10 aa, synthetic construct
DYDRGDRNVV

SEQ ID NO: 131354 - protein, 10 aa, synthetic construct
DYERGDRNVV

SEQ ID NO: 131355 - protein, 10 aa, synthetic construct
DNGRGDRNVV

SEQ ID NO: 131356 - protein, 10 aa, synthetic construct
DNARGDRNVV

SEQ ID NO: 131357 - protein, 10 aa, synthetic construct
DNVRGDRNVV

SEQ ID NO: 131358 - protein, 10 aa, synthetic construct
DNPRGDRNVV

SEQ ID NO: 131359 - protein, 10 aa, synthetic construct
DNLRGDRNVV

SEQ ID NO: 131360 - protein, 10 aa, synthetic construct
DNIRGDRNVV

SEQ ID NO: 131361 - protein, 10 aa, synthetic construct
DNMRGDRNVV

SEQ ID NO: 131362 - protein, 10 aa, synthetic construct
DNWRGDRNVV

SEQ ID NO: 131363 - protein, 10 aa, synthetic construct
DNFRGDRNVV

SEQ ID NO: 131364 - protein, 10 aa, synthetic construct
DNKRGDRNVV

SEQ ID NO: 131365 - protein, 10 aa, synthetic construct
DNRRGDRNVV

SEQ ID NO: 131366 - protein, 10 aa, synthetic construct
DNHRGDRNVV

SEQ ID NO: 131367 - protein, 10 aa, synthetic construct
DNSRGDRNVV

SEQ ID NO: 131368 - protein, 10 aa, synthetic construct
DNTRGDRNVV

SEQ ID NO: 131369 - protein, 10 aa, synthetic construct
DNYRGDRNVV

SEQ ID NO: 131370 - protein, 10 aa, synthetic construct
DNNRGDRNVV

SEQ ID NO: 131371 - protein, 10 aa, synthetic construct
DNQRGDRNVV

SEQ ID NO: 131372 - protein, 10 aa, synthetic construct
DNDRGDRNVV

SEQ ID NO: 131373 - protein, 10 aa, synthetic construct
DNERGDRNVV

SEQ ID NO: 131374 - protein, 10 aa, synthetic construct
DQGRGDRNVV

SEQ ID NO: 131375 - protein, 10 aa, synthetic construct
DQARGDRNVV

SEQ ID NO: 131376 - protein, 10 aa, synthetic construct
DQVRGDRNVV

SEQ ID NO: 131377 - protein, 10 aa, synthetic construct
DQPRGDRNVV

SEQ ID NO: 131378 - protein, 10 aa, synthetic construct
DQLRGDRNVV

SEQ ID NO: 131379 - protein, 10 aa, synthetic construct
DQIRGDRNVV

SEQ ID NO: 131380 - protein, 10 aa, synthetic construct
DQMRGDRNVV

SEQ ID NO: 131381 - protein, 10 aa, synthetic construct
DQWRGDRNVV

SEQ ID NO: 131382 - protein, 10 aa, synthetic construct
DQFRGDRNVV

SEQ ID NO: 131383 - protein, 10 aa, synthetic construct
DQKRGDRNVV

SEQ ID NO: 131384 - protein, 10 aa, synthetic construct
DQRRGDRNVV

SEQ ID NO: 131385 - protein, 10 aa, synthetic construct
DQHRGDRNVV

SEQ ID NO: 131386 - protein, 10 aa, synthetic construct
DQSRGDRNVV

SEQ ID NO: 131387 - protein, 10 aa, synthetic construct
DQTRGDRNVV

SEQ ID NO: 131388 - protein, 10 aa, synthetic construct
DQYRGDRNVV

SEQ ID NO: 131389 - protein, 10 aa, synthetic construct
DQNRGDRNVV

SEQ ID NO: 131390 - protein, 10 aa, synthetic construct
DQQRGDRNVV

SEQ ID NO: 131391 - protein, 10 aa, synthetic construct
DQDRGDRNVV

SEQ ID NO: 131392 - protein, 10 aa, synthetic construct
DQERGDRNVV

SEQ ID NO: 131393 - protein, 10 aa, synthetic construct
DDGRGDRNVV

SEQ ID NO: 131394 - protein, 10 aa, synthetic construct
DDARGDRNVV

SEQ ID NO: 131395 - protein, 10 aa, synthetic construct
DDVRGDRNVV

SEQ ID NO: 131396 - protein, 10 aa, synthetic construct
DDPRGDRNVV

SEQ ID NO: 131397 - protein, 10 aa, synthetic construct
DDLRGDRNVV

SEQ ID NO: 131398 - protein, 10 aa, synthetic construct
DDIRGDRNVV

SEQ ID NO: 131399 - protein, 10 aa, synthetic construct
DDMRGDRNVV

SEQ ID NO: 131400 - protein, 10 aa, synthetic construct
DDWRGDRNVV

SEQ ID NO: 131401 - protein, 10 aa, synthetic construct
DDFRGDRNVV

SEQ ID NO: 131402 - protein, 10 aa, synthetic construct
DDKRGDRNVV

SEQ ID NO: 131403 - protein, 10 aa, synthetic construct
DDRRGDRNVV

SEQ ID NO: 131404 - protein, 10 aa, synthetic construct
DDHRGDRNVV

SEQ ID NO: 131405 - protein, 10 aa, synthetic construct
DDSRGDRNVV

SEQ ID NO: 131406 - protein, 10 aa, synthetic construct
DDTRGDRNVV

SEQ ID NO: 131407 - protein, 10 aa, synthetic construct
DDYRGDRNVV

SEQ ID NO: 131408 - protein, 10 aa, synthetic construct
DDNRGDRNVV

SEQ ID NO: 131409 - protein, 10 aa, synthetic construct
DDQRGDRNVV

SEQ ID NO: 131410 - protein, 10 aa, synthetic construct
DDDRGDRNVV

SEQ ID NO: 131411 - protein, 10 aa, synthetic construct
DDERGDRNVV

SEQ ID NO: 131412 - protein, 10 aa, synthetic construct
DEGRGDRNVV

SEQ ID NO: 131413 - protein, 10 aa, synthetic construct
DEARGDRNVV

SEQ ID NO: 131414 - protein, 10 aa, synthetic construct
DEVRGDRNVV

SEQ ID NO: 131415 - protein, 10 aa, synthetic construct
DEPRGDRNVV

SEQ ID NO: 131416 - protein, 10 aa, synthetic construct
DELRGDRNVV

SEQ ID NO: 131417 - protein, 10 aa, synthetic construct
DEIRGDRNVV

SEQ ID NO: 131418 - protein, 10 aa, synthetic construct
DEMRGDRNVV

SEQ ID NO: 131419 - protein, 10 aa, synthetic construct
DEWRGDRNVV

SEQ ID NO: 131420 - protein, 10 aa, synthetic construct
DEFRGDRNVV

SEQ ID NO: 131421 - protein, 10 aa, synthetic construct
DEKRGDRNVV

SEQ ID NO: 131422 - protein, 10 aa, synthetic construct
DERRGDRNVV

SEQ ID NO: 131423 - protein, 10 aa, synthetic construct
DEHRGDRNVV

SEQ ID NO: 131424 - protein, 10 aa, synthetic construct
DESRGDRNVV

SEQ ID NO: 131425 - protein, 10 aa, synthetic construct
DETRGDRNVV

SEQ ID NO: 131426 - protein, 10 aa, synthetic construct
DEYRGDRNVV

SEQ ID NO: 131427 - protein, 10 aa, synthetic construct
DENRGDRNVV

SEQ ID NO: 131428 - protein, 10 aa, synthetic construct
DEQRGDRNVV

SEQ ID NO: 131429 - protein, 10 aa, synthetic construct
DEDRGDRNVV

SEQ ID NO: 131430 - protein, 10 aa, synthetic construct
DEERGDRNVV

SEQ ID NO: 131431 - protein, 10 aa, synthetic construct
QGGRGDRNVV

SEQ ID NO: 131432 - protein, 10 aa, synthetic construct
QGARGDRNVV

SEQ ID NO: 131433 - protein, 10 aa, synthetic construct
QGVRGDRNVV

SEQ ID NO: 131434 - protein, 10 aa, synthetic construct
QGPRGDRNVV

SEQ ID NO: 131435 - protein, 10 aa, synthetic construct
QGLRGDRNVV

SEQ ID NO: 131436 - protein, 10 aa, synthetic construct
QGIRGDRNVV

SEQ ID NO: 131437 - protein, 10 aa, synthetic construct
QGMRGDRNVV

SEQ ID NO: 131438 - protein, 10 aa, synthetic construct
QGWRGDRNVV

SEQ ID NO: 131439 - protein, 10 aa, synthetic construct
QGFRGDRNVV

SEQ ID NO: 131440 - protein, 10 aa, synthetic construct
QGKRGDRNVV

SEQ ID NO: 131441 - protein, 10 aa, synthetic construct
QGRRGDRNVV

SEQ ID NO: 131442 - protein, 10 aa, synthetic construct
QGHRGDRNVV

SEQ ID NO: 131443 - protein, 10 aa, synthetic construct
QGSRGDRNVV

SEQ ID NO: 131444 - protein, 10 aa, synthetic construct
QGTRGDRNVV

SEQ ID NO: 131445 - protein, 10 aa, synthetic construct
QGYRGDRNVV

SEQ ID NO: 131446 - protein, 10 aa, synthetic construct
QGNRGDRNVV

SEQ ID NO: 131447 - protein, 10 aa, synthetic construct
QGQRGDRNVV

SEQ ID NO: 131448 - protein, 10 aa, synthetic construct
QGDRGDRNVV

SEQ ID NO: 131449 - protein, 10 aa, synthetic construct
QGERGDRNVV

SEQ ID NO: 131450 - protein, 10 aa, synthetic construct
QAGRGDRNVV

SEQ ID NO: 131451 - protein, 10 aa, synthetic construct
QAARGDRNVV

SEQ ID NO: 131452 - protein, 10 aa, synthetic construct
QAVRGDRNVV

SEQ ID NO: 131453 - protein, 10 aa, synthetic construct
QAPRGDRNVV

SEQ ID NO: 131454 - protein, 10 aa, synthetic construct
QALRGDRNVV

SEQ ID NO: 131455 - protein, 10 aa, synthetic construct
QAIRGDRNVV

SEQ ID NO: 131456 - protein, 10 aa, synthetic construct
QAMRGDRNVV

SEQ ID NO: 131457 - protein, 10 aa, synthetic construct
QAWRGDRNVV

SEQ ID NO: 131458 - protein, 10 aa, synthetic construct
QAFRGDRNVV

SEQ ID NO: 131459 - protein, 10 aa, synthetic construct
QAKRGDRNVV

SEQ ID NO: 131460 - protein, 10 aa, synthetic construct
QARRGDRNVV

SEQ ID NO: 131461 - protein, 10 aa, synthetic construct
QAHRGDRNVV

SEQ ID NO: 131462 - protein, 10 aa, synthetic construct
QASRGDRNVV

SEQ ID NO: 131463 - protein, 10 aa, synthetic construct
QATRGDRNVV

SEQ ID NO: 131464 - protein, 10 aa, synthetic construct
QAYRGDRNVV

SEQ ID NO: 131465 - protein, 10 aa, synthetic construct
QANRGDRNVV

SEQ ID NO: 131466 - protein, 10 aa, synthetic construct
QAQRGDRNVV

SEQ ID NO: 131467 - protein, 10 aa, synthetic construct
QADRGDRNVV

SEQ ID NO: 131468 - protein, 10 aa, synthetic construct
QAERGDRNVV

SEQ ID NO: 131469 - protein, 10 aa, synthetic construct
QVGRGDRNVV

SEQ ID NO: 131470 - protein, 10 aa, synthetic construct
QVARGDRNVV

SEQ ID NO: 131471 - protein, 10 aa, synthetic construct
QVVRGDRNVV

SEQ ID NO: 131472 - protein, 10 aa, synthetic construct
QVPRGDRNVV

SEQ ID NO: 131473 - protein, 10 aa, synthetic construct
QVLRGDRNVV

SEQ ID NO: 131474 - protein, 10 aa, synthetic construct
QVIRGDRNVV

SEQ ID NO: 131475 - protein, 10 aa, synthetic construct
QVMRGDRNVV

SEQ ID NO: 131476 - protein, 10 aa, synthetic construct
QVWRGDRNVV

SEQ ID NO: 131477 - protein, 10 aa, synthetic construct
QVFRGDRNVV

SEQ ID NO: 131478 - protein, 10 aa, synthetic construct
QVKRGDRNVV

SEQ ID NO: 131479 - protein, 10 aa, synthetic construct
QVRRGDRNVV

SEQ ID NO: 131480 - protein, 10 aa, synthetic construct
QVHRGDRNVV

SEQ ID NO: 131481 - protein, 10 aa, synthetic construct
QVSRGDRNVV

SEQ ID NO: 131482 - protein, 10 aa, synthetic construct
QVTRGDRNVV

SEQ ID NO: 131483 - protein, 10 aa, synthetic construct
QVYRGDRNVV

SEQ ID NO: 131484 - protein, 10 aa, synthetic construct
QVNRGDRNVV

SEQ ID NO: 131485 - protein, 10 aa, synthetic construct
QVQRGDRNVV

SEQ ID NO: 131486 - protein, 10 aa, synthetic construct
QVDRGDRNVV

SEQ ID NO: 131487 - protein, 10 aa, synthetic construct
QVERGDRNVV

SEQ ID NO: 131488 - protein, 10 aa, synthetic construct
QPGRGDRNVV

SEQ ID NO: 131489 - protein, 10 aa, synthetic construct
QPARGDRNVV

SEQ ID NO: 131490 - protein, 10 aa, synthetic construct
QPVRGDRNVV

SEQ ID NO: 131491 - protein, 10 aa, synthetic construct
QPPRGDRNVV

SEQ ID NO: 131492 - protein, 10 aa, synthetic construct
QPLRGDRNVV

SEQ ID NO: 131493 - protein, 10 aa, synthetic construct
QPIRGDRNVV

SEQ ID NO: 131494 - protein, 10 aa, synthetic construct
QPMRGDRNVV

SEQ ID NO: 131495 - protein, 10 aa, synthetic construct
QPWRGDRNVV

SEQ ID NO: 131496 - protein, 10 aa, synthetic construct
QPFRGDRNVV

SEQ ID NO: 131497 - protein, 10 aa, synthetic construct
QPKRGDRNVV

SEQ ID NO: 131498 - protein, 10 aa, synthetic construct
QPRRGDRNVV

SEQ ID NO: 131499 - protein, 10 aa, synthetic construct
QPHRGDRNVV

SEQ ID NO: 131500 - protein, 10 aa, synthetic construct
QPSRGDRNVV

SEQ ID NO: 131501 - protein, 10 aa, synthetic construct
QPTRGDRNVV

SEQ ID NO: 131502 - protein, 10 aa, synthetic construct
QPYRGDRNVV

SEQ ID NO: 131503 - protein, 10 aa, synthetic construct
QPNRGDRNVV

SEQ ID NO: 131504 - protein, 10 aa, synthetic construct
QPQRGDRNVV

SEQ ID NO: 131505 - protein, 10 aa, synthetic construct
QPDRGDRNVV

SEQ ID NO: 131506 - protein, 10 aa, synthetic construct
QPERGDRNVV

SEQ ID NO: 131507 - protein, 10 aa, synthetic construct
QLGRGDRNVV

SEQ ID NO: 131508 - protein, 10 aa, synthetic construct
QLARGDRNVV

SEQ ID NO: 131509 - protein, 10 aa, synthetic construct
QLVRGDRNVV

SEQ ID NO: 131510 - protein, 10 aa, synthetic construct
QLPRGDRNVV

SEQ ID NO: 131511 - protein, 10 aa, synthetic construct
QLLRGDRNVV

SEQ ID NO: 131512 - protein, 10 aa, synthetic construct
QLIRGDRNVV

SEQ ID NO: 131513 - protein, 10 aa, synthetic construct
QLMRGDRNVV

SEQ ID NO: 131514 - protein, 10 aa, synthetic construct
QLWRGDRNVV

SEQ ID NO: 131515 - protein, 10 aa, synthetic construct
QLFRGDRNVV

SEQ ID NO: 131516 - protein, 10 aa, synthetic construct
QLKRGDRNVV

SEQ ID NO: 131517 - protein, 10 aa, synthetic construct
QLRRGDRNVV

SEQ ID NO: 131518 - protein, 10 aa, synthetic construct
QLHRGDRNVV

SEQ ID NO: 131519 - protein, 10 aa, synthetic construct
QLSRGDRNVV

SEQ ID NO: 131520 - protein, 10 aa, synthetic construct
QLTRGDRNVV

SEQ ID NO: 131521 - protein, 10 aa, synthetic construct
QLYRGDRNVV

SEQ ID NO: 131522 - protein, 10 aa, synthetic construct
QLNRGDRNVV

SEQ ID NO: 131523 - protein, 10 aa, synthetic construct
QLQRGDRNVV

SEQ ID NO: 131524 - protein, 10 aa, synthetic construct
QLDRGDRNVV

SEQ ID NO: 131525 - protein, 10 aa, synthetic construct
QLERGDRNVV

SEQ ID NO: 131526 - protein, 10 aa, synthetic construct
QIGRGDRNVV

SEQ ID NO: 131527 - protein, 10 aa, synthetic construct
QIARGDRNVV

SEQ ID NO: 131528 - protein, 10 aa, synthetic construct
QIVRGDRNVV

SEQ ID NO: 131529 - protein, 10 aa, synthetic construct
QIPRGDRNVV

SEQ ID NO: 131530 - protein, 10 aa, synthetic construct
QILRGDRNVV

SEQ ID NO: 131531 - protein, 10 aa, synthetic construct
QIIRGDRNVV

SEQ ID NO: 131532 - protein, 10 aa, synthetic construct
QIMRGDRNVV

SEQ ID NO: 131533 - protein, 10 aa, synthetic construct
QIWRGDRNVV

SEQ ID NO: 131534 - protein, 10 aa, synthetic construct
QIFRGDRNVV

SEQ ID NO: 131535 - protein, 10 aa, synthetic construct
QIKRGDRNVV

SEQ ID NO: 131536 - protein, 10 aa, synthetic construct
QIRRGDRNVV

SEQ ID NO: 131537 - protein, 10 aa, synthetic construct
QIHRGDRNVV

SEQ ID NO: 131538 - protein, 10 aa, synthetic construct
QISRGDRNVV

SEQ ID NO: 131539 - protein, 10 aa, synthetic construct
QITRGDRNVV

SEQ ID NO: 131540 - protein, 10 aa, synthetic construct
QIYRGDRNVV

SEQ ID NO: 131541 - protein, 10 aa, synthetic construct
QINRGDRNVV

SEQ ID NO: 131542 - protein, 10 aa, synthetic construct
QIQRGDRNVV

SEQ ID NO: 131543 - protein, 10 aa, synthetic construct
QIDRGDRNVV

SEQ ID NO: 131544 - protein, 10 aa, synthetic construct
QIERGDRNVV

SEQ ID NO: 131545 - protein, 10 aa, synthetic construct
QMGRGDRNVV

SEQ ID NO: 131546 - protein, 10 aa, synthetic construct
QMARGDRNVV

SEQ ID NO: 131547 - protein, 10 aa, synthetic construct
QMVRGDRNVV

SEQ ID NO: 131548 - protein, 10 aa, synthetic construct
QMPRGDRNVV

SEQ ID NO: 131549 - protein, 10 aa, synthetic construct
QMLRGDRNVV

SEQ ID NO: 131550 - protein, 10 aa, synthetic construct
QMIRGDRNVV

SEQ ID NO: 131551 - protein, 10 aa, synthetic construct
QMMRGDRNVV

SEQ ID NO: 131552 - protein, 10 aa, synthetic construct
QMWRGDRNVV

SEQ ID NO: 131553 - protein, 10 aa, synthetic construct
QMFRGDRNVV

SEQ ID NO: 131554 - protein, 10 aa, synthetic construct
QMKRGDRNVV

SEQ ID NO: 131555 - protein, 10 aa, synthetic construct
QMRRGDRNVV

SEQ ID NO: 131556 - protein, 10 aa, synthetic construct
QMHRGDRNVV

SEQ ID NO: 131557 - protein, 10 aa, synthetic construct
QMSRGDRNVV

SEQ ID NO: 131558 - protein, 10 aa, synthetic construct
QMTRGDRNVV

SEQ ID NO: 131559 - protein, 10 aa, synthetic construct
QMYRGDRNVV

SEQ ID NO: 131560 - protein, 10 aa, synthetic construct
QMNRGDRNVV

SEQ ID NO: 131561 - protein, 10 aa, synthetic construct
QMQRGDRNVV

SEQ ID NO: 131562 - protein, 10 aa, synthetic construct
QMDRGDRNVV

SEQ ID NO: 131563 - protein, 10 aa, synthetic construct
QMERGDRNVV

SEQ ID NO: 131564 - protein, 10 aa, synthetic construct
QWGRGDRNVV

SEQ ID NO: 131565 - protein, 10 aa, synthetic construct
QWARGDRNVV

SEQ ID NO: 131566 - protein, 10 aa, synthetic construct
QWVRGDRNVV

SEQ ID NO: 131567 - protein, 10 aa, synthetic construct
QWPRGDRNVV

SEQ ID NO: 131568 - protein, 10 aa, synthetic construct
QWLRGDRNVV

SEQ ID NO: 131569 - protein, 10 aa, synthetic construct
QWIRGDRNVV

SEQ ID NO: 131570 - protein, 10 aa, synthetic construct
QWMRGDRNVV

SEQ ID NO: 131571 - protein, 10 aa, synthetic construct
QWWRGDRNVV

SEQ ID NO: 131572 - protein, 10 aa, synthetic construct
QWFRGDRNVV

SEQ ID NO: 131573 - protein, 10 aa, synthetic construct
QWKRGDRNVV

SEQ ID NO: 131574 - protein, 10 aa, synthetic construct
QWRRGDRNVV

SEQ ID NO: 131575 - protein, 10 aa, synthetic construct
QWHRGDRNVV

SEQ ID NO: 131576 - protein, 10 aa, synthetic construct
QWSRGDRNVV

SEQ ID NO: 131577 - protein, 10 aa, synthetic construct
QWTRGDRNVV

SEQ ID NO: 131578 - protein, 10 aa, synthetic construct
QWYRGDRNVV

SEQ ID NO: 131579 - protein, 10 aa, synthetic construct
QWNRGDRNVV

SEQ ID NO: 131580 - protein, 10 aa, synthetic construct
QWQRGDRNVV

SEQ ID NO: 131581 - protein, 10 aa, synthetic construct
QWDRGDRNVV

SEQ ID NO: 131582 - protein, 10 aa, synthetic construct
QWERGDRNVV

SEQ ID NO: 131583 - protein, 10 aa, synthetic construct
QFGRGDRNVV

SEQ ID NO: 131584 - protein, 10 aa, synthetic construct
QFARGDRNVV

SEQ ID NO: 131585 - protein, 10 aa, synthetic construct
QFVRGDRNVV

SEQ ID NO: 131586 - protein, 10 aa, synthetic construct
QFPRGDRNVV

SEQ ID NO: 131587 - protein, 10 aa, synthetic construct
QFLRGDRNVV

SEQ ID NO: 131588 - protein, 10 aa, synthetic construct
QFIRGDRNVV

SEQ ID NO: 131589 - protein, 10 aa, synthetic construct
QFMRGDRNVV

SEQ ID NO: 131590 - protein, 10 aa, synthetic construct
QFWRGDRNVV

SEQ ID NO: 131591 - protein, 10 aa, synthetic construct
QFFRGDRNVV

SEQ ID NO: 131592 - protein, 10 aa, synthetic construct
QFKRGDRNVV

SEQ ID NO: 131593 - protein, 10 aa, synthetic construct
QFRRGDRNVV

SEQ ID NO: 131594 - protein, 10 aa, synthetic construct
QFHRGDRNVV

SEQ ID NO: 131595 - protein, 10 aa, synthetic construct
QFSRGDRNVV

SEQ ID NO: 131596 - protein, 10 aa, synthetic construct
QFTRGDRNVV

SEQ ID NO: 131597 - protein, 10 aa, synthetic construct
QFYRGDRNVV

SEQ ID NO: 131598 - protein, 10 aa, synthetic construct
QFNRGDRNVV

SEQ ID NO: 131599 - protein, 10 aa, synthetic construct
QFQRGDRNVV

SEQ ID NO: 131600 - protein, 10 aa, synthetic construct
QFDRGDRNVV

SEQ ID NO: 131601 - protein, 10 aa, synthetic construct
QFERGDRNVV

SEQ ID NO: 131602 - protein, 10 aa, synthetic construct
QKGRGDRNVV

SEQ ID NO: 131603 - protein, 10 aa, synthetic construct
QKARGDRNVV

SEQ ID NO: 131604 - protein, 10 aa, synthetic construct
QKVRGDRNVV

SEQ ID NO: 131605 - protein, 10 aa, synthetic construct
QKPRGDRNVV

SEQ ID NO: 131606 - protein, 10 aa, synthetic construct
QKLRGDRNVV

SEQ ID NO: 131607 - protein, 10 aa, synthetic construct
QKIRGDRNVV

SEQ ID NO: 131608 - protein, 10 aa, synthetic construct
QKMRGDRNVV

SEQ ID NO: 131609 - protein, 10 aa, synthetic construct
QKWRGDRNVV

SEQ ID NO: 131610 - protein, 10 aa, synthetic construct
QKFRGDRNVV

SEQ ID NO: 131611 - protein, 10 aa, synthetic construct
QKKRGDRNVV

SEQ ID NO: 131612 - protein, 10 aa, synthetic construct
QKRRGDRNVV

SEQ ID NO: 131613 - protein, 10 aa, synthetic construct
QKHRGDRNVV

SEQ ID NO: 131614 - protein, 10 aa, synthetic construct
QKSRGDRNVV

SEQ ID NO: 131615 - protein, 10 aa, synthetic construct
QKTRGDRNVV

SEQ ID NO: 131616 - protein, 10 aa, synthetic construct
QKYRGDRNVV

SEQ ID NO: 131617 - protein, 10 aa, synthetic construct
QKNRGDRNVV

SEQ ID NO: 131618 - protein, 10 aa, synthetic construct
QKQRGDRNVV

SEQ ID NO: 131619 - protein, 10 aa, synthetic construct
QKDRGDRNVV

SEQ ID NO: 131620 - protein, 10 aa, synthetic construct
QKERGDRNVV

SEQ ID NO: 131621 - protein, 10 aa, synthetic construct
QRGRGDRNVV

SEQ ID NO: 131622 - protein, 10 aa, synthetic construct
QRARGDRNVV

SEQ ID NO: 131623 - protein, 10 aa, synthetic construct
QRVRGDRNVV

SEQ ID NO: 131624 - protein, 10 aa, synthetic construct
QRPRGDRNVV

SEQ ID NO: 131625 - protein, 10 aa, synthetic construct
QRLRGDRNVV

SEQ ID NO: 131626 - protein, 10 aa, synthetic construct
QRIRGDRNVV

SEQ ID NO: 131627 - protein, 10 aa, synthetic construct
QRMRGDRNVV

SEQ ID NO: 131628 - protein, 10 aa, synthetic construct
QRWRGDRNVV

SEQ ID NO: 131629 - protein, 10 aa, synthetic construct
QRFRGDRNVV

SEQ ID NO: 131630 - protein, 10 aa, synthetic construct
QRKRGDRNVV

SEQ ID NO: 131631 - protein, 10 aa, synthetic construct
QRRRGDRNVV

SEQ ID NO: 131632 - protein, 10 aa, synthetic construct
QRHRGDRNVV

SEQ ID NO: 131633 - protein, 10 aa, synthetic construct
QRSRGDRNVV

SEQ ID NO: 131634 - protein, 10 aa, synthetic construct
QRTRGDRNVV

SEQ ID NO: 131635 - protein, 10 aa, synthetic construct
QRYRGDRNVV

SEQ ID NO: 131636 - protein, 10 aa, synthetic construct
QRNRGDRNVV

SEQ ID NO: 131637 - protein, 10 aa, synthetic construct
QRQRGDRNVV

SEQ ID NO: 131638 - protein, 10 aa, synthetic construct
QRDRGDRNVV

SEQ ID NO: 131639 - protein, 10 aa, synthetic construct
QRERGDRNVV

SEQ ID NO: 131640 - protein, 10 aa, synthetic construct
QHGRGDRNVV

SEQ ID NO: 131641 - protein, 10 aa, synthetic construct
QHARGDRNVV

SEQ ID NO: 131642 - protein, 10 aa, synthetic construct
QHVRGDRNVV

SEQ ID NO: 131643 - protein, 10 aa, synthetic construct
QHPRGDRNVV

SEQ ID NO: 131644 - protein, 10 aa, synthetic construct
QHLRGDRNVV

SEQ ID NO: 131645 - protein, 10 aa, synthetic construct
QHIRGDRNVV

SEQ ID NO: 131646 - protein, 10 aa, synthetic construct
QHMRGDRNVV

SEQ ID NO: 131647 - protein, 10 aa, synthetic construct
QHWRGDRNVV

SEQ ID NO: 131648 - protein, 10 aa, synthetic construct
QHFRGDRNVV

SEQ ID NO: 131649 - protein, 10 aa, synthetic construct
QHKRGDRNVV

SEQ ID NO: 131650 - protein, 10 aa, synthetic construct
QHRRGDRNVV

SEQ ID NO: 131651 - protein, 10 aa, synthetic construct
QHHRGDRNVV

SEQ ID NO: 131652 - protein, 10 aa, synthetic construct
QHSRGDRNVV

SEQ ID NO: 131653 - protein, 10 aa, synthetic construct
QHTRGDRNVV

SEQ ID NO: 131654 - protein, 10 aa, synthetic construct
QHYRGDRNVV

SEQ ID NO: 131655 - protein, 10 aa, synthetic construct
QHNRGDRNVV

SEQ ID NO: 131656 - protein, 10 aa, synthetic construct
QHQRGDRNVV

SEQ ID NO: 131657 - protein, 10 aa, synthetic construct
QHDRGDRNVV

SEQ ID NO: 131658 - protein, 10 aa, synthetic construct
QHERGDRNVV

SEQ ID NO: 131659 - protein, 10 aa, synthetic construct
QSGRGDRNVV

SEQ ID NO: 131660 - protein, 10 aa, synthetic construct
QSARGDRNVV

SEQ ID NO: 131661 - protein, 10 aa, synthetic construct
QSVRGDRNVV

SEQ ID NO: 131662 - protein, 10 aa, synthetic construct
QSPRGDRNVV

SEQ ID NO: 131663 - protein, 10 aa, synthetic construct
QSLRGDRNVV

SEQ ID NO: 131664 - protein, 10 aa, synthetic construct
QSIRGDRNVV

SEQ ID NO: 131665 - protein, 10 aa, synthetic construct
QSMRGDRNVV

SEQ ID NO: 131666 - protein, 10 aa, synthetic construct
QSWRGDRNVV

SEQ ID NO: 131667 - protein, 10 aa, synthetic construct
QSFRGDRNVV

SEQ ID NO: 131668 - protein, 10 aa, synthetic construct
QSKRGDRNVV

SEQ ID NO: 131669 - protein, 10 aa, synthetic construct
QSRRGDRNVV

SEQ ID NO: 131670 - protein, 10 aa, synthetic construct
QSHRGDRNVV

SEQ ID NO: 131671 - protein, 10 aa, synthetic construct
QSSRGDRNVV

SEQ ID NO: 131672 - protein, 10 aa, synthetic construct
QSTRGDRNVV

SEQ ID NO: 131673 - protein, 10 aa, synthetic construct
QSYRGDRNVV

SEQ ID NO: 131674 - protein, 10 aa, synthetic construct
QSNRGDRNVV

SEQ ID NO: 131675 - protein, 10 aa, synthetic construct
QSQRGDRNVV

SEQ ID NO: 131676 - protein, 10 aa, synthetic construct
QSDRGDRNVV

SEQ ID NO: 131677 - protein, 10 aa, synthetic construct
QSERGDRNVV

SEQ ID NO: 131678 - protein, 10 aa, synthetic construct
QTGRGDRNVV

SEQ ID NO: 131679 - protein, 10 aa, synthetic construct
QTARGDRNVV

SEQ ID NO: 131680 - protein, 10 aa, synthetic construct
QTVRGDRNVV

SEQ ID NO: 131681 - protein, 10 aa, synthetic construct
QTPRGDRNVV

SEQ ID NO: 131682 - protein, 10 aa, synthetic construct
QTLRGDRNVV

SEQ ID NO: 131683 - protein, 10 aa, synthetic construct
QTIRGDRNVV

SEQ ID NO: 131684 - protein, 10 aa, synthetic construct
QTMRGDRNVV

SEQ ID NO: 131685 - protein, 10 aa, synthetic construct
QTWRGDRNVV

SEQ ID NO: 131686 - protein, 10 aa, synthetic construct
QTFRGDRNVV

SEQ ID NO: 131687 - protein, 10 aa, synthetic construct
QTKRGDRNVV

SEQ ID NO: 131688 - protein, 10 aa, synthetic construct
QTRRGDRNVV

SEQ ID NO: 131689 - protein, 10 aa, synthetic construct
QTHRGDRNVV

SEQ ID NO: 131690 - protein, 10 aa, synthetic construct
QTSRGDRNVV

SEQ ID NO: 131691 - protein, 10 aa, synthetic construct
QTTRGDRNVV

SEQ ID NO: 131692 - protein, 10 aa, synthetic construct
QTYRGDRNVV

SEQ ID NO: 131693 - protein, 10 aa, synthetic construct
QTNRGDRNVV

SEQ ID NO: 131694 - protein, 10 aa, synthetic construct
QTQRGDRNVV

SEQ ID NO: 131695 - protein, 10 aa, synthetic construct
QTDRGDRNVV

SEQ ID NO: 131696 - protein, 10 aa, synthetic construct
QTERGDRNVV

SEQ ID NO: 131697 - protein, 10 aa, synthetic construct
QYGRGDRNVV

SEQ ID NO: 131698 - protein, 10 aa, synthetic construct
QYARGDRNVV

SEQ ID NO: 131699 - protein, 10 aa, synthetic construct
QYVRGDRNVV

SEQ ID NO: 131700 - protein, 10 aa, synthetic construct
QYPRGDRNVV

SEQ ID NO: 131701 - protein, 10 aa, synthetic construct
QYLRGDRNVV

SEQ ID NO: 131702 - protein, 10 aa, synthetic construct
QYIRGDRNVV

SEQ ID NO: 131703 - protein, 10 aa, synthetic construct
QYMRGDRNVV

SEQ ID NO: 131704 - protein, 10 aa, synthetic construct
QYWRGDRNVV

SEQ ID NO: 131705 - protein, 10 aa, synthetic construct
QYFRGDRNVV

SEQ ID NO: 131706 - protein, 10 aa, synthetic construct
QYKRGDRNVV

SEQ ID NO: 131707 - protein, 10 aa, synthetic construct
QYRRGDRNVV

SEQ ID NO: 131708 - protein, 10 aa, synthetic construct
QYHRGDRNVV

SEQ ID NO: 131709 - protein, 10 aa, synthetic construct
QYSRGDRNVV

SEQ ID NO: 131710 - protein, 10 aa, synthetic construct
QYTRGDRNVV

SEQ ID NO: 131711 - protein, 10 aa, synthetic construct
QYYRGDRNVV

SEQ ID NO: 131712 - protein, 10 aa, synthetic construct
QYNRGDRNVV

SEQ ID NO: 131713 - protein, 10 aa, synthetic construct
QYQRGDRNVV

SEQ ID NO: 131714 - protein, 10 aa, synthetic construct
QYDRGDRNVV

SEQ ID NO: 131715 - protein, 10 aa, synthetic construct
QYERGDRNVV

SEQ ID NO: 131716 - protein, 10 aa, synthetic construct
QNGRGDRNVV

SEQ ID NO: 131717 - protein, 10 aa, synthetic construct
QNARGDRNVV

SEQ ID NO: 131718 - protein, 10 aa, synthetic construct
QNVRGDRNVV

SEQ ID NO: 131719 - protein, 10 aa, synthetic construct
QNPRGDRNVV

SEQ ID NO: 131720 - protein, 10 aa, synthetic construct
QNLRGDRNVV

SEQ ID NO: 131721 - protein, 10 aa, synthetic construct
QNIRGDRNVV

SEQ ID NO: 131722 - protein, 10 aa, synthetic construct
QNMRGDRNVV

SEQ ID NO: 131723 - protein, 10 aa, synthetic construct
QNWRGDRNVV

SEQ ID NO: 131724 - protein, 10 aa, synthetic construct
QNFRGDRNVV

SEQ ID NO: 131725 - protein, 10 aa, synthetic construct
QNKRGDRNVV

SEQ ID NO: 131726 - protein, 10 aa, synthetic construct
QNRRGDRNVV

SEQ ID NO: 131727 - protein, 10 aa, synthetic construct
QNHRGDRNVV

SEQ ID NO: 131728 - protein, 10 aa, synthetic construct
QNSRGDRNVV

SEQ ID NO: 131729 - protein, 10 aa, synthetic construct
QNTRGDRNVV

SEQ ID NO: 131730 - protein, 10 aa, synthetic construct
QNYRGDRNVV

SEQ ID NO: 131731 - protein, 10 aa, synthetic construct
QNNRGDRNVV

SEQ ID NO: 131732 - protein, 10 aa, synthetic construct
QNQRGDRNVV

SEQ ID NO: 131733 - protein, 10 aa, synthetic construct
QNDRGDRNVV

SEQ ID NO: 131734 - protein, 10 aa, synthetic construct
QNERGDRNVV

SEQ ID NO: 131735 - protein, 10 aa, synthetic construct
QQGRGDRNVV

SEQ ID NO: 131736 - protein, 10 aa, synthetic construct
QQARGDRNVV

SEQ ID NO: 131737 - protein, 10 aa, synthetic construct
QQVRGDRNVV

SEQ ID NO: 131738 - protein, 10 aa, synthetic construct
QQPRGDRNVV

SEQ ID NO: 131739 - protein, 10 aa, synthetic construct
QQLRGDRNVV

SEQ ID NO: 131740 - protein, 10 aa, synthetic construct
QQIRGDRNVV

SEQ ID NO: 131741 - protein, 10 aa, synthetic construct
QQMRGDRNVV

SEQ ID NO: 131742 - protein, 10 aa, synthetic construct
QQWRGDRNVV

SEQ ID NO: 131743 - protein, 10 aa, synthetic construct
QQFRGDRNVV

SEQ ID NO: 131744 - protein, 10 aa, synthetic construct
QQKRGDRNVV

SEQ ID NO: 131745 - protein, 10 aa, synthetic construct
QQRRGDRNVV

SEQ ID NO: 131746 - protein, 10 aa, synthetic construct
QQHRGDRNVV

SEQ ID NO: 131747 - protein, 10 aa, synthetic construct
QQSRGDRNVV

SEQ ID NO: 131748 - protein, 10 aa, synthetic construct
QQTRGDRNVV

SEQ ID NO: 131749 - protein, 10 aa, synthetic construct
QQYRGDRNVV

SEQ ID NO: 131750 - protein, 10 aa, synthetic construct
QQNRGDRNVV

SEQ ID NO: 131751 - protein, 10 aa, synthetic construct
QQQRGDRNVV

SEQ ID NO: 131752 - protein, 10 aa, synthetic construct
QQDRGDRNVV

SEQ ID NO: 131753 - protein, 10 aa, synthetic construct
QQERGDRNVV

SEQ ID NO: 131754 - protein, 10 aa, synthetic construct
QDGRGDRNVV

SEQ ID NO: 131755 - protein, 10 aa, synthetic construct
QDARGDRNVV

SEQ ID NO: 131756 - protein, 10 aa, synthetic construct
QDVRGDRNVV

SEQ ID NO: 131757 - protein, 10 aa, synthetic construct
QDPRGDRNVV

SEQ ID NO: 131758 - protein, 10 aa, synthetic construct
QDLRGDRNVV

SEQ ID NO: 131759 - protein, 10 aa, synthetic construct
QDIRGDRNVV

SEQ ID NO: 131760 - protein, 10 aa, synthetic construct
QDMRGDRNVV

SEQ ID NO: 131761 - protein, 10 aa, synthetic construct
QDWRGDRNVV

SEQ ID NO: 131762 - protein, 10 aa, synthetic construct
QDFRGDRNVV

SEQ ID NO: 131763 - protein, 10 aa, synthetic construct
QDKRGDRNVV

SEQ ID NO: 131764 - protein, 10 aa, synthetic construct
QDRRGDRNVV

SEQ ID NO: 131765 - protein, 10 aa, synthetic construct
QDHRGDRNVV

SEQ ID NO: 131766 - protein, 10 aa, synthetic construct
QDSRGDRNVV

SEQ ID NO: 131767 - protein, 10 aa, synthetic construct
QDTRGDRNVV

SEQ ID NO: 131768 - protein, 10 aa, synthetic construct
QDYRGDRNVV

SEQ ID NO: 131769 - protein, 10 aa, synthetic construct
QDNRGDRNVV

SEQ ID NO: 131770 - protein, 10 aa, synthetic construct
QDQRGDRNVV

SEQ ID NO: 131771 - protein, 10 aa, synthetic construct
QDDRGDRNVV

SEQ ID NO: 131772 - protein, 10 aa, synthetic construct
QDERGDRNVV

SEQ ID NO: 131773 - protein, 10 aa, synthetic construct
QEGRGDRNVV

SEQ ID NO: 131774 - protein, 10 aa, synthetic construct
QEARGDRNVV

SEQ ID NO: 131775 - protein, 10 aa, synthetic construct
QEVRGDRNVV

SEQ ID NO: 131776 - protein, 10 aa, synthetic construct
QEPRGDRNVV

SEQ ID NO: 131777 - protein, 10 aa, synthetic construct
QELRGDRNVV

SEQ ID NO: 131778 - protein, 10 aa, synthetic construct
QEIRGDRNVV

SEQ ID NO: 131779 - protein, 10 aa, synthetic construct
QEMRGDRNVV

SEQ ID NO: 131780 - protein, 10 aa, synthetic construct
QEWRGDRNVV

SEQ ID NO: 131781 - protein, 10 aa, synthetic construct
QEFRGDRNVV

SEQ ID NO: 131782 - protein, 10 aa, synthetic construct
QEKRGDRNVV

SEQ ID NO: 131783 - protein, 10 aa, synthetic construct
QERRGDRNVV

SEQ ID NO: 131784 - protein, 10 aa, synthetic construct
QEHRGDRNVV

SEQ ID NO: 131785 - protein, 10 aa, synthetic construct
QESRGDRNVV

SEQ ID NO: 131786 - protein, 10 aa, synthetic construct
QETRGDRNVV

SEQ ID NO: 131787 - protein, 10 aa, synthetic construct
QEYRGDRNVV

SEQ ID NO: 131788 - protein, 10 aa, synthetic construct
QENRGDRNVV

SEQ ID NO: 131789 - protein, 10 aa, synthetic construct
QEQRGDRNVV

SEQ ID NO: 131790 - protein, 10 aa, synthetic construct
QEDRGDRNVV

SEQ ID NO: 131791 - protein, 10 aa, synthetic construct
QEERGDRNVV

SEQ ID NO: 131792 - protein, 10 aa, synthetic construct
SGGRGDRQGI

SEQ ID NO: 131793 - protein, 10 aa, synthetic construct
SGARGDRQGI

SEQ ID NO: 131794 - protein, 10 aa, synthetic construct
SGVRGDRQGI

SEQ ID NO: 131795 - protein, 10 aa, synthetic construct
SGPRGDRQGI

SEQ ID NO: 131796 - protein, 10 aa, synthetic construct
SGLRGDRQGI

SEQ ID NO: 131797 - protein, 10 aa, synthetic construct
SGIRGDRQGI

SEQ ID NO: 131798 - protein, 10 aa, synthetic construct
SGMRGDRQGI

SEQ ID NO: 131799 - protein, 10 aa, synthetic construct
SGWRGDRQGI

SEQ ID NO: 131800 - protein, 10 aa, synthetic construct
SGFRGDRQGI

SEQ ID NO: 131801 - protein, 10 aa, synthetic construct
SGKRGDRQGI

SEQ ID NO: 131802 - protein, 10 aa, synthetic construct
SGRRGDRQGI

SEQ ID NO: 131803 - protein, 10 aa, synthetic construct
SGHRGDRQGI

SEQ ID NO: 131804 - protein, 10 aa, synthetic construct
SGSRGDRQGI

SEQ ID NO: 131805 - protein, 10 aa, synthetic construct
SGTRGDRQGI

SEQ ID NO: 131806 - protein, 10 aa, synthetic construct
SGYRGDRQGI

SEQ ID NO: 131807 - protein, 10 aa, synthetic construct
SGNRGDRQGI

SEQ ID NO: 131808 - protein, 10 aa, synthetic construct
SGQRGDRQGI

SEQ ID NO: 131809 - protein, 10 aa, synthetic construct
SGDRGDRQGI

SEQ ID NO: 131810 - protein, 10 aa, synthetic construct
SGERGDRQGI

SEQ ID NO: 131811 - protein, 10 aa, synthetic construct
SAGRGDRQGI

SEQ ID NO: 131812 - protein, 10 aa, synthetic construct
SAARGDRQGI

SEQ ID NO: 131813 - protein, 10 aa, synthetic construct
SAVRGDRQGI

SEQ ID NO: 131814 - protein, 10 aa, synthetic construct
SAPRGDRQGI

SEQ ID NO: 131815 - protein, 10 aa, synthetic construct
SALRGDRQGI

SEQ ID NO: 131816 - protein, 10 aa, synthetic construct
SAIRGDRQGI

SEQ ID NO: 131817 - protein, 10 aa, synthetic construct
SAMRGDRQGI

SEQ ID NO: 131818 - protein, 10 aa, synthetic construct
SAWRGDRQGI

SEQ ID NO: 131819 - protein, 10 aa, synthetic construct
SAFRGDRQGI

SEQ ID NO: 131820 - protein, 10 aa, synthetic construct
SAKRGDRQGI

SEQ ID NO: 131821 - protein, 10 aa, synthetic construct
SARRGDRQGI

SEQ ID NO: 131822 - protein, 10 aa, synthetic construct
SAHRGDRQGI

SEQ ID NO: 131823 - protein, 10 aa, synthetic construct
SASRGDRQGI

SEQ ID NO: 131824 - protein, 10 aa, synthetic construct
SATRGDRQGI

SEQ ID NO: 131825 - protein, 10 aa, synthetic construct
SAYRGDRQGI

SEQ ID NO: 131826 - protein, 10 aa, synthetic construct
SANRGDRQGI

SEQ ID NO: 131827 - protein, 10 aa, synthetic construct
SAQRGDRQGI

SEQ ID NO: 131828 - protein, 10 aa, synthetic construct
SADRGDRQGI

SEQ ID NO: 131829 - protein, 10 aa, synthetic construct
SAERGDRQGI

SEQ ID NO: 131830 - protein, 10 aa, synthetic construct
SVGRGDRQGI

SEQ ID NO: 131831 - protein, 10 aa, synthetic construct
SVARGDRQGI

SEQ ID NO: 131832 - protein, 10 aa, synthetic construct
SVVRGDRQGI

SEQ ID NO: 131833 - protein, 10 aa, synthetic construct
SVPRGDRQGI

SEQ ID NO: 131834 - protein, 10 aa, synthetic construct
SVLRGDRQGI

SEQ ID NO: 131835 - protein, 10 aa, synthetic construct
SVIRGDRQGI

SEQ ID NO: 131836 - protein, 10 aa, synthetic construct
SVMRGDRQGI

SEQ ID NO: 131837 - protein, 10 aa, synthetic construct
SVWRGDRQGI

SEQ ID NO: 131838 - protein, 10 aa, synthetic construct
SVFRGDRQGI

SEQ ID NO: 131839 - protein, 10 aa, synthetic construct
SVKRGDRQGI

SEQ ID NO: 131840 - protein, 10 aa, synthetic construct
SVRRGDRQGI

SEQ ID NO: 131841 - protein, 10 aa, synthetic construct
SVHRGDRQGI

SEQ ID NO: 131842 - protein, 10 aa, synthetic construct
SVSRGDRQGI

SEQ ID NO: 131843 - protein, 10 aa, synthetic construct
SVTRGDRQGI

SEQ ID NO: 131844 - protein, 10 aa, synthetic construct
SVYRGDRQGI

SEQ ID NO: 131845 - protein, 10 aa, synthetic construct
SVNRGDRQGI

SEQ ID NO: 131846 - protein, 10 aa, synthetic construct
SVQRGDRQGI

SEQ ID NO: 131847 - protein, 10 aa, synthetic construct
SVDRGDRQGI

SEQ ID NO: 131848 - protein, 10 aa, synthetic construct
SVERGDRQGI

SEQ ID NO: 131849 - protein, 10 aa, synthetic construct
SPGRGDRQGI

SEQ ID NO: 131850 - protein, 10 aa, synthetic construct
SPARGDRQGI

SEQ ID NO: 131851 - protein, 10 aa, synthetic construct
SPVRGDRQGI

SEQ ID NO: 131852 - protein, 10 aa, synthetic construct
SPPRGDRQGI

SEQ ID NO: 131853 - protein, 10 aa, synthetic construct
SPLRGDRQGI

SEQ ID NO: 131854 - protein, 10 aa, synthetic construct
SPIRGDRQGI

SEQ ID NO: 131855 - protein, 10 aa, synthetic construct
SPMRGDRQGI

SEQ ID NO: 131856 - protein, 10 aa, synthetic construct
SPWRGDRQGI

SEQ ID NO: 131857 - protein, 10 aa, synthetic construct
SPFRGDRQGI

SEQ ID NO: 131858 - protein, 10 aa, synthetic construct
SPKRGDRQGI

SEQ ID NO: 131859 - protein, 10 aa, synthetic construct
SPRRGDRQGI

SEQ ID NO: 131860 - protein, 10 aa, synthetic construct
SPHRGDRQGI

SEQ ID NO: 131861 - protein, 10 aa, synthetic construct
SPSRGDRQGI

SEQ ID NO: 131862 - protein, 10 aa, synthetic construct
SPTRGDRQGI

SEQ ID NO: 131863 - protein, 10 aa, synthetic construct
SPYRGDRQGI

SEQ ID NO: 131864 - protein, 10 aa, synthetic construct
SPNRGDRQGI

SEQ ID NO: 131865 - protein, 10 aa, synthetic construct
SPQRGDRQGI

SEQ ID NO: 131866 - protein, 10 aa, synthetic construct
SPDRGDRQGI

SEQ ID NO: 131867 - protein, 10 aa, synthetic construct
SPERGDRQGI

SEQ ID NO: 131868 - protein, 10 aa, synthetic construct
SLGRGDRQGI

SEQ ID NO: 131869 - protein, 10 aa, synthetic construct
SLARGDRQGI

SEQ ID NO: 131870 - protein, 10 aa, synthetic construct
SLVRGDRQGI

SEQ ID NO: 131871 - protein, 10 aa, synthetic construct
SLPRGDRQGI

SEQ ID NO: 131872 - protein, 10 aa, synthetic construct
SLLRGDRQGI

SEQ ID NO: 131873 - protein, 10 aa, synthetic construct
SLIRGDRQGI

SEQ ID NO: 131874 - protein, 10 aa, synthetic construct
SLMRGDRQGI

SEQ ID NO: 131875 - protein, 10 aa, synthetic construct
SLWRGDRQGI

SEQ ID NO: 131876 - protein, 10 aa, synthetic construct
SLFRGDRQGI

SEQ ID NO: 131877 - protein, 10 aa, synthetic construct
SLKRGDRQGI

SEQ ID NO: 131878 - protein, 10 aa, synthetic construct
SLRRGDRQGI

SEQ ID NO: 131879 - protein, 10 aa, synthetic construct
SLHRGDRQGI

SEQ ID NO: 131880 - protein, 10 aa, synthetic construct
SLSRGDRQGI

SEQ ID NO: 131881 - protein, 10 aa, synthetic construct
SLTRGDRQGI

SEQ ID NO: 131882 - protein, 10 aa, synthetic construct
SLYRGDRQGI

SEQ ID NO: 131883 - protein, 10 aa, synthetic construct
SLNRGDRQGI

SEQ ID NO: 131884 - protein, 10 aa, synthetic construct
SLQRGDRQGI

SEQ ID NO: 131885 - protein, 10 aa, synthetic construct
SLDRGDRQGI

SEQ ID NO: 131886 - protein, 10 aa, synthetic construct
SLERGDRQGI

SEQ ID NO: 131887 - protein, 10 aa, synthetic construct
SIGRGDRQGI

SEQ ID NO: 131888 - protein, 10 aa, synthetic construct
SIARGDRQGI

SEQ ID NO: 131889 - protein, 10 aa, synthetic construct
SIVRGDRQGI

SEQ ID NO: 131890 - protein, 10 aa, synthetic construct
SIPRGDRQGI

SEQ ID NO: 131891 - protein, 10 aa, synthetic construct
SILRGDRQGI

SEQ ID NO: 131892 - protein, 10 aa, synthetic construct
SIIRGDRQGI

SEQ ID NO: 131893 - protein, 10 aa, synthetic construct
SIMRGDRQGI

SEQ ID NO: 131894 - protein, 10 aa, synthetic construct
SIWRGDRQGI

SEQ ID NO: 131895 - protein, 10 aa, synthetic construct
SIFRGDRQGI

SEQ ID NO: 131896 - protein, 10 aa, synthetic construct
SIKRGDRQGI

SEQ ID NO: 131897 - protein, 10 aa, synthetic construct
SIRRGDRQGI

SEQ ID NO: 131898 - protein, 10 aa, synthetic construct
SIHRGDRQGI

SEQ ID NO: 131899 - protein, 10 aa, synthetic construct
SISRGDRQGI

SEQ ID NO: 131900 - protein, 10 aa, synthetic construct
SITRGDRQGI

SEQ ID NO: 131901 - protein, 10 aa, synthetic construct
SIYRGDRQGI

SEQ ID NO: 131902 - protein, 10 aa, synthetic construct
SINRGDRQGI

SEQ ID NO: 131903 - protein, 10 aa, synthetic construct
SIQRGDRQGI

SEQ ID NO: 131904 - protein, 10 aa, synthetic construct
SIDRGDRQGI

SEQ ID NO: 131905 - protein, 10 aa, synthetic construct
SIERGDRQGI

SEQ ID NO: 131906 - protein, 10 aa, synthetic construct
SMGRGDRQGI

SEQ ID NO: 131907 - protein, 10 aa, synthetic construct
SMARGDRQGI

SEQ ID NO: 131908 - protein, 10 aa, synthetic construct
SMVRGDRQGI

SEQ ID NO: 131909 - protein, 10 aa, synthetic construct
SMPRGDRQGI

SEQ ID NO: 131910 - protein, 10 aa, synthetic construct
SMLRGDRQGI

SEQ ID NO: 131911 - protein, 10 aa, synthetic construct
SMIRGDRQGI

SEQ ID NO: 131912 - protein, 10 aa, synthetic construct
SMMRGDRQGI

SEQ ID NO: 131913 - protein, 10 aa, synthetic construct
SMWRGDRQGI

SEQ ID NO: 131914 - protein, 10 aa, synthetic construct
SMFRGDRQGI

SEQ ID NO: 131915 - protein, 10 aa, synthetic construct
SMKRGDRQGI

SEQ ID NO: 131916 - protein, 10 aa, synthetic construct
SMRRGDRQGI

SEQ ID NO: 131917 - protein, 10 aa, synthetic construct
SMHRGDRQGI

SEQ ID NO: 131918 - protein, 10 aa, synthetic construct
SMSRGDRQGI

SEQ ID NO: 131919 - protein, 10 aa, synthetic construct
SMTRGDRQGI

SEQ ID NO: 131920 - protein, 10 aa, synthetic construct
SMYRGDRQGI

SEQ ID NO: 131921 - protein, 10 aa, synthetic construct
SMNRGDRQGI

SEQ ID NO: 131922 - protein, 10 aa, synthetic construct
SMQRGDRQGI

SEQ ID NO: 131923 - protein, 10 aa, synthetic construct
SMDRGDRQGI

SEQ ID NO: 131924 - protein, 10 aa, synthetic construct
SMERGDRQGI

SEQ ID NO: 131925 - protein, 10 aa, synthetic construct
SWGRGDRQGI

SEQ ID NO: 131926 - protein, 10 aa, synthetic construct
SWARGDRQGI

SEQ ID NO: 131927 - protein, 10 aa, synthetic construct
SWVRGDRQGI

SEQ ID NO: 131928 - protein, 10 aa, synthetic construct
SWPRGDRQGI

SEQ ID NO: 131929 - protein, 10 aa, synthetic construct
SWLRGDRQGI

SEQ ID NO: 131930 - protein, 10 aa, synthetic construct
SWIRGDRQGI

SEQ ID NO: 131931 - protein, 10 aa, synthetic construct
SWMRGDRQGI

SEQ ID NO: 131932 - protein, 10 aa, synthetic construct
SWWRGDRQGI

SEQ ID NO: 131933 - protein, 10 aa, synthetic construct
SWFRGDRQGI

SEQ ID NO: 131934 - protein, 10 aa, synthetic construct
SWKRGDRQGI

SEQ ID NO: 131935 - protein, 10 aa, synthetic construct
SWRRGDRQGI

SEQ ID NO: 131936 - protein, 10 aa, synthetic construct
SWHRGDRQGI

SEQ ID NO: 131937 - protein, 10 aa, synthetic construct
SWSRGDRQGI

SEQ ID NO: 131938 - protein, 10 aa, synthetic construct
SWTRGDRQGI

SEQ ID NO: 131939 - protein, 10 aa, synthetic construct
SWYRGDRQGI

SEQ ID NO: 131940 - protein, 10 aa, synthetic construct
SWNRGDRQGI

SEQ ID NO: 131941 - protein, 10 aa, synthetic construct
SWQRGDRQGI

SEQ ID NO: 131942 - protein, 10 aa, synthetic construct
SWDRGDRQGI

SEQ ID NO: 131943 - protein, 10 aa, synthetic construct
SWERGDRQGI

SEQ ID NO: 131944 - protein, 10 aa, synthetic construct
SFGRGDRQGI

SEQ ID NO: 131945 - protein, 10 aa, synthetic construct
SFARGDRQGI

SEQ ID NO: 131946 - protein, 10 aa, synthetic construct
SFVRGDRQGI

SEQ ID NO: 131947 - protein, 10 aa, synthetic construct
SFPRGDRQGI

SEQ ID NO: 131948 - protein, 10 aa, synthetic construct
SFLRGDRQGI

SEQ ID NO: 131949 - protein, 10 aa, synthetic construct
SFIRGDRQGI

SEQ ID NO: 131950 - protein, 10 aa, synthetic construct
SFMRGDRQGI

SEQ ID NO: 131951 - protein, 10 aa, synthetic construct
SFWRGDRQGI

SEQ ID NO: 131952 - protein, 10 aa, synthetic construct
SFFRGDRQGI

SEQ ID NO: 131953 - protein, 10 aa, synthetic construct
SFKRGDRQGI

SEQ ID NO: 131954 - protein, 10 aa, synthetic construct
SFRRGDRQGI

SEQ ID NO: 131955 - protein, 10 aa, synthetic construct
SFHRGDRQGI

SEQ ID NO: 131956 - protein, 10 aa, synthetic construct
SFSRGDRQGI

SEQ ID NO: 131957 - protein, 10 aa, synthetic construct
SFTRGDRQGI

SEQ ID NO: 131958 - protein, 10 aa, synthetic construct
SFYRGDRQGI

SEQ ID NO: 131959 - protein, 10 aa, synthetic construct
SFNRGDRQGI

SEQ ID NO: 131960 - protein, 10 aa, synthetic construct
SFQRGDRQGI

SEQ ID NO: 131961 - protein, 10 aa, synthetic construct
SFDRGDRQGI

SEQ ID NO: 131962 - protein, 10 aa, synthetic construct
SFERGDRQGI

SEQ ID NO: 131963 - protein, 10 aa, synthetic construct
SKGRGDRQGI

SEQ ID NO: 131964 - protein, 10 aa, synthetic construct
SKARGDRQGI

SEQ ID NO: 131965 - protein, 10 aa, synthetic construct
SKVRGDRQGI

SEQ ID NO: 131966 - protein, 10 aa, synthetic construct
SKPRGDRQGI

SEQ ID NO: 131967 - protein, 10 aa, synthetic construct
SKLRGDRQGI

SEQ ID NO: 131968 - protein, 10 aa, synthetic construct
SKIRGDRQGI

SEQ ID NO: 131969 - protein, 10 aa, synthetic construct
SKMRGDRQGI

SEQ ID NO: 131970 - protein, 10 aa, synthetic construct
SKWRGDRQGI

SEQ ID NO: 131971 - protein, 10 aa, synthetic construct
SKFRGDRQGI

SEQ ID NO: 131972 - protein, 10 aa, synthetic construct
SKKRGDRQGI

SEQ ID NO: 131973 - protein, 10 aa, synthetic construct
SKRRGDRQGI

SEQ ID NO: 131974 - protein, 10 aa, synthetic construct
SKHRGDRQGI

SEQ ID NO: 131975 - protein, 10 aa, synthetic construct
SKSRGDRQGI

SEQ ID NO: 131976 - protein, 10 aa, synthetic construct
SKTRGDRQGI

SEQ ID NO: 131977 - protein, 10 aa, synthetic construct
SKYRGDRQGI

SEQ ID NO: 131978 - protein, 10 aa, synthetic construct
SKNRGDRQGI

SEQ ID NO: 131979 - protein, 10 aa, synthetic construct
SKQRGDRQGI

SEQ ID NO: 131980 - protein, 10 aa, synthetic construct
SKDRGDRQGI

SEQ ID NO: 131981 - protein, 10 aa, synthetic construct
SKERGDRQGI

SEQ ID NO: 131982 - protein, 10 aa, synthetic construct
SRGRGDRQGI

SEQ ID NO: 131983 - protein, 10 aa, synthetic construct
SRARGDRQGI

SEQ ID NO: 131984 - protein, 10 aa, synthetic construct
SRVRGDRQGI

SEQ ID NO: 131985 - protein, 10 aa, synthetic construct
SRPRGDRQGI

SEQ ID NO: 131986 - protein, 10 aa, synthetic construct
SRLRGDRQGI

SEQ ID NO: 131987 - protein, 10 aa, synthetic construct
SRIRGDRQGI

SEQ ID NO: 131988 - protein, 10 aa, synthetic construct
SRMRGDRQGI

SEQ ID NO: 131989 - protein, 10 aa, synthetic construct
SRWRGDRQGI

SEQ ID NO: 131990 - protein, 10 aa, synthetic construct
SRFRGDRQGI

SEQ ID NO: 131991 - protein, 10 aa, synthetic construct
SRKRGDRQGI

SEQ ID NO: 131992 - protein, 10 aa, synthetic construct
SRRRGDRQGI

SEQ ID NO: 131993 - protein, 10 aa, synthetic construct
SRHRGDRQGI

SEQ ID NO: 131994 - protein, 10 aa, synthetic construct
SRSRGDRQGI

SEQ ID NO: 131995 - protein, 10 aa, synthetic construct
SRTRGDRQGI

SEQ ID NO: 131996 - protein, 10 aa, synthetic construct
SRYRGDRQGI

SEQ ID NO: 131997 - protein, 10 aa, synthetic construct
SRNRGDRQGI

SEQ ID NO: 131998 - protein, 10 aa, synthetic construct
SRQRGDRQGI

SEQ ID NO: 131999 - protein, 10 aa, synthetic construct
SRDRGDRQGI

SEQ ID NO: 132000 - protein, 10 aa, synthetic construct
SRERGDRQGI

SEQ ID NO: 132001 - protein, 10 aa, synthetic construct
SHGRGDRQGI

SEQ ID NO: 132002 - protein, 10 aa, synthetic construct
SHARGDRQGI

SEQ ID NO: 132003 - protein, 10 aa, synthetic construct
SHVRGDRQGI

SEQ ID NO: 132004 - protein, 10 aa, synthetic construct
SHPRGDRQGI

SEQ ID NO: 132005 - protein, 10 aa, synthetic construct
SHLRGDRQGI

SEQ ID NO: 132006 - protein, 10 aa, synthetic construct
SHIRGDRQGI

SEQ ID NO: 132007 - protein, 10 aa, synthetic construct
SHMRGDRQGI

SEQ ID NO: 132008 - protein, 10 aa, synthetic construct
SHWRGDRQGI

SEQ ID NO: 132009 - protein, 10 aa, synthetic construct
SHFRGDRQGI

SEQ ID NO: 132010 - protein, 10 aa, synthetic construct
SHKRGDRQGI

SEQ ID NO: 132011 - protein, 10 aa, synthetic construct
SHRRGDRQGI

SEQ ID NO: 132012 - protein, 10 aa, synthetic construct
SHHRGDRQGI

SEQ ID NO: 132013 - protein, 10 aa, synthetic construct
SHSRGDRQGI

SEQ ID NO: 132014 - protein, 10 aa, synthetic construct
SHTRGDRQGI

SEQ ID NO: 132015 - protein, 10 aa, synthetic construct
SHYRGDRQGI

SEQ ID NO: 132016 - protein, 10 aa, synthetic construct
SHNRGDRQGI

SEQ ID NO: 132017 - protein, 10 aa, synthetic construct
SHQRGDRQGI

SEQ ID NO: 132018 - protein, 10 aa, synthetic construct
SHDRGDRQGI

SEQ ID NO: 132019 - protein, 10 aa, synthetic construct
SHERGDRQGI

SEQ ID NO: 132020 - protein, 10 aa, synthetic construct
SSGRGDRQGI

SEQ ID NO: 132021 - protein, 10 aa, synthetic construct
SSARGDRQGI

SEQ ID NO: 132022 - protein, 10 aa, synthetic construct
SSVRGDRQGI

SEQ ID NO: 132023 - protein, 10 aa, synthetic construct
SSPRGDRQGI

SEQ ID NO: 132024 - protein, 10 aa, synthetic construct
SSLRGDRQGI

SEQ ID NO: 132025 - protein, 10 aa, synthetic construct
SSIRGDRQGI

SEQ ID NO: 132026 - protein, 10 aa, synthetic construct
SSMRGDRQGI

SEQ ID NO: 132027 - protein, 10 aa, synthetic construct
SSWRGDRQGI

SEQ ID NO: 132028 - protein, 10 aa, synthetic construct
SSFRGDRQGI

SEQ ID NO: 132029 - protein, 10 aa, synthetic construct
SSKRGDRQGI

SEQ ID NO: 132030 - protein, 10 aa, synthetic construct
SSRRGDRQGI

SEQ ID NO: 132031 - protein, 10 aa, synthetic construct
SSHRGDRQGI

SEQ ID NO: 132032 - protein, 10 aa, synthetic construct
SSSRGDRQGI

SEQ ID NO: 132033 - protein, 10 aa, synthetic construct
SSTRGDRQGI

SEQ ID NO: 132034 - protein, 10 aa, synthetic construct
SSYRGDRQGI

SEQ ID NO: 132035 - protein, 10 aa, synthetic construct
SSNRGDRQGI

SEQ ID NO: 132036 - protein, 10 aa, synthetic construct
SSQRGDRQGI

SEQ ID NO: 132037 - protein, 10 aa, synthetic construct
SSDRGDRQGI

SEQ ID NO: 132038 - protein, 10 aa, synthetic construct
SSERGDRQGI

SEQ ID NO: 132039 - protein, 10 aa, synthetic construct
STGRGDRQGI

SEQ ID NO: 132040 - protein, 10 aa, synthetic construct
STARGDRQGI

SEQ ID NO: 132041 - protein, 10 aa, synthetic construct
STVRGDRQGI

SEQ ID NO: 132042 - protein, 10 aa, synthetic construct
STPRGDRQGI

SEQ ID NO: 132043 - protein, 10 aa, synthetic construct
STLRGDRQGI

SEQ ID NO: 132044 - protein, 10 aa, synthetic construct
STIRGDRQGI

SEQ ID NO: 132045 - protein, 10 aa, synthetic construct
STMRGDRQGI

SEQ ID NO: 132046 - protein, 10 aa, synthetic construct
STWRGDRQGI

SEQ ID NO: 132047 - protein, 10 aa, synthetic construct
STFRGDRQGI

SEQ ID NO: 132048 - protein, 10 aa, synthetic construct
STKRGDRQGI

SEQ ID NO: 132049 - protein, 10 aa, synthetic construct
STRRGDRQGI

SEQ ID NO: 132050 - protein, 10 aa, synthetic construct
STHRGDRQGI

SEQ ID NO: 132051 - protein, 10 aa, synthetic construct
STSRGDRQGI

SEQ ID NO: 132052 - protein, 10 aa, synthetic construct
STTRGDRQGI

SEQ ID NO: 132053 - protein, 10 aa, synthetic construct
STYRGDRQGI

SEQ ID NO: 132054 - protein, 10 aa, synthetic construct
STNRGDRQGI

SEQ ID NO: 132055 - protein, 10 aa, synthetic construct
STQRGDRQGI

SEQ ID NO: 132056 - protein, 10 aa, synthetic construct
STDRGDRQGI

SEQ ID NO: 132057 - protein, 10 aa, synthetic construct
STERGDRQGI

SEQ ID NO: 132058 - protein, 10 aa, synthetic construct
SYGRGDRQGI

SEQ ID NO: 132059 - protein, 10 aa, synthetic construct
SYARGDRQGI

SEQ ID NO: 132060 - protein, 10 aa, synthetic construct
SYVRGDRQGI

SEQ ID NO: 132061 - protein, 10 aa, synthetic construct
SYPRGDRQGI

SEQ ID NO: 132062 - protein, 10 aa, synthetic construct
SYLRGDRQGI

SEQ ID NO: 132063 - protein, 10 aa, synthetic construct
SYIRGDRQGI

SEQ ID NO: 132064 - protein, 10 aa, synthetic construct
SYMRGDRQGI

SEQ ID NO: 132065 - protein, 10 aa, synthetic construct
SYWRGDRQGI

SEQ ID NO: 132066 - protein, 10 aa, synthetic construct
SYFRGDRQGI

SEQ ID NO: 132067 - protein, 10 aa, synthetic construct
SYKRGDRQGI

SEQ ID NO: 132068 - protein, 10 aa, synthetic construct
SYRRGDRQGI

SEQ ID NO: 132069 - protein, 10 aa, synthetic construct
SYHRGDRQGI

SEQ ID NO: 132070 - protein, 10 aa, synthetic construct
SYSRGDRQGI

SEQ ID NO: 132071 - protein, 10 aa, synthetic construct
SYTRGDRQGI

SEQ ID NO: 132072 - protein, 10 aa, synthetic construct
SYYRGDRQGI

SEQ ID NO: 132073 - protein, 10 aa, synthetic construct
SYNRGDRQGI

SEQ ID NO: 132074 - protein, 10 aa, synthetic construct
SYQRGDRQGI

SEQ ID NO: 132075 - protein, 10 aa, synthetic construct
SYDRGDRQGI

SEQ ID NO: 132076 - protein, 10 aa, synthetic construct
SYERGDRQGI

SEQ ID NO: 132077 - protein, 10 aa, synthetic construct
SNGRGDRQGI

SEQ ID NO: 132078 - protein, 10 aa, synthetic construct
SNARGDRQGI

SEQ ID NO: 132079 - protein, 10 aa, synthetic construct
SNVRGDRQGI

SEQ ID NO: 132080 - protein, 10 aa, synthetic construct
SNPRGDRQGI

SEQ ID NO: 132081 - protein, 10 aa, synthetic construct
SNLRGDRQGI

SEQ ID NO: 132082 - protein, 10 aa, synthetic construct
SNIRGDRQGI

SEQ ID NO: 132083 - protein, 10 aa, synthetic construct
SNMRGDRQGI

SEQ ID NO: 132084 - protein, 10 aa, synthetic construct
SNWRGDRQGI

SEQ ID NO: 132085 - protein, 10 aa, synthetic construct
SNFRGDRQGI

SEQ ID NO: 132086 - protein, 10 aa, synthetic construct
SNKRGDRQGI

SEQ ID NO: 132087 - protein, 10 aa, synthetic construct
SNRRGDRQGI

SEQ ID NO: 132088 - protein, 10 aa, synthetic construct
SNHRGDRQGI

SEQ ID NO: 132089 - protein, 10 aa, synthetic construct
SNSRGDRQGI

SEQ ID NO: 132090 - protein, 10 aa, synthetic construct
SNTRGDRQGI

SEQ ID NO: 132091 - protein, 10 aa, synthetic construct
SNYRGDRQGI

SEQ ID NO: 132092 - protein, 10 aa, synthetic construct
SNNRGDRQGI

SEQ ID NO: 132093 - protein, 10 aa, synthetic construct
SNQRGDRQGI

SEQ ID NO: 132094 - protein, 10 aa, synthetic construct
SNDRGDRQGI

SEQ ID NO: 132095 - protein, 10 aa, synthetic construct
SNERGDRQGI

SEQ ID NO: 132096 - protein, 10 aa, synthetic construct
SQGRGDRQGI

SEQ ID NO: 132097 - protein, 10 aa, synthetic construct
SQARGDRQGI

SEQ ID NO: 132098 - protein, 10 aa, synthetic construct
SQVRGDRQGI

SEQ ID NO: 132099 - protein, 10 aa, synthetic construct
SQPRGDRQGI

SEQ ID NO: 132100 - protein, 10 aa, synthetic construct
SQLRGDRQGI

SEQ ID NO: 132101 - protein, 10 aa, synthetic construct
SQIRGDRQGI

SEQ ID NO: 132102 - protein, 10 aa, synthetic construct
SQMRGDRQGI

SEQ ID NO: 132103 - protein, 10 aa, synthetic construct
SQWRGDRQGI

SEQ ID NO: 132104 - protein, 10 aa, synthetic construct
SQFRGDRQGI

SEQ ID NO: 132105 - protein, 10 aa, synthetic construct
SQKRGDRQGI

SEQ ID NO: 132106 - protein, 10 aa, synthetic construct
SQRRGDRQGI

SEQ ID NO: 132107 - protein, 10 aa, synthetic construct
SQHRGDRQGI

SEQ ID NO: 132108 - protein, 10 aa, synthetic construct
SQSRGDRQGI

SEQ ID NO: 132109 - protein, 10 aa, synthetic construct
SQTRGDRQGI

SEQ ID NO: 132110 - protein, 10 aa, synthetic construct
SQYRGDRQGI

SEQ ID NO: 132111 - protein, 10 aa, synthetic construct
SQNRGDRQGI

SEQ ID NO: 132112 - protein, 10 aa, synthetic construct
SQQRGDRQGI

SEQ ID NO: 132113 - protein, 10 aa, synthetic construct
SQDRGDRQGI

SEQ ID NO: 132114 - protein, 10 aa, synthetic construct
SQERGDRQGI

SEQ ID NO: 132115 - protein, 10 aa, synthetic construct
SDGRGDRQGI

SEQ ID NO: 132116 - protein, 10 aa, synthetic construct
SDARGDRQGI

SEQ ID NO: 132117 - protein, 10 aa, synthetic construct
SDVRGDRQGI

SEQ ID NO: 132118 - protein, 10 aa, synthetic construct
SDPRGDRQGI

SEQ ID NO: 132119 - protein, 10 aa, synthetic construct
SDLRGDRQGI

SEQ ID NO: 132120 - protein, 10 aa, synthetic construct
SDIRGDRQGI

SEQ ID NO: 132121 - protein, 10 aa, synthetic construct
SDMRGDRQGI

SEQ ID NO: 132122 - protein, 10 aa, synthetic construct
SDWRGDRQGI

SEQ ID NO: 132123 - protein, 10 aa, synthetic construct
SDFRGDRQGI

SEQ ID NO: 132124 - protein, 10 aa, synthetic construct
SDKRGDRQGI

SEQ ID NO: 132125 - protein, 10 aa, synthetic construct
SDRRGDRQGI

SEQ ID NO: 132126 - protein, 10 aa, synthetic construct
SDHRGDRQGI

SEQ ID NO: 132127 - protein, 10 aa, synthetic construct
SDSRGDRQGI

SEQ ID NO: 132128 - protein, 10 aa, synthetic construct
SDTRGDRQGI

SEQ ID NO: 132129 - protein, 10 aa, synthetic construct
SDYRGDRQGI

SEQ ID NO: 132130 - protein, 10 aa, synthetic construct
SDNRGDRQGI

SEQ ID NO: 132131 - protein, 10 aa, synthetic construct
SDQRGDRQGI

SEQ ID NO: 132132 - protein, 10 aa, synthetic construct
SDDRGDRQGI

SEQ ID NO: 132133 - protein, 10 aa, synthetic construct
SDERGDRQGI

SEQ ID NO: 132134 - protein, 10 aa, synthetic construct
SEGRGDRQGI

SEQ ID NO: 132135 - protein, 10 aa, synthetic construct
SEARGDRQGI

SEQ ID NO: 132136 - protein, 10 aa, synthetic construct
SEVRGDRQGI

SEQ ID NO: 132137 - protein, 10 aa, synthetic construct
SEPRGDRQGI

SEQ ID NO: 132138 - protein, 10 aa, synthetic construct
SELRGDRQGI

SEQ ID NO: 132139 - protein, 10 aa, synthetic construct
SEIRGDRQGI

SEQ ID NO: 132140 - protein, 10 aa, synthetic construct
SEMRGDRQGI

SEQ ID NO: 132141 - protein, 10 aa, synthetic construct
SEWRGDRQGI

SEQ ID NO: 132142 - protein, 10 aa, synthetic construct
SEFRGDRQGI

SEQ ID NO: 132143 - protein, 10 aa, synthetic construct
SEKRGDRQGI

SEQ ID NO: 132144 - protein, 10 aa, synthetic construct
SERRGDRQGI

SEQ ID NO: 132145 - protein, 10 aa, synthetic construct
SEHRGDRQGI

SEQ ID NO: 132146 - protein, 10 aa, synthetic construct
SESRGDRQGI

SEQ ID NO: 132147 - protein, 10 aa, synthetic construct
SETRGDRQGI

SEQ ID NO: 132148 - protein, 10 aa, synthetic construct
SEYRGDRQGI

SEQ ID NO: 132149 - protein, 10 aa, synthetic construct
SENRGDRQGI

SEQ ID NO: 132150 - protein, 10 aa, synthetic construct
SEQRGDRQGI

SEQ ID NO: 132151 - protein, 10 aa, synthetic construct
SEDRGDRQGI

SEQ ID NO: 132152 - protein, 10 aa, synthetic construct
SEERGDRQGI

SEQ ID NO: 132153 - protein, 10 aa, synthetic construct
TGGRGDRQGI

SEQ ID NO: 132154 - protein, 10 aa, synthetic construct
TGARGDRQGI

SEQ ID NO: 132155 - protein, 10 aa, synthetic construct
TGVRGDRQGI

SEQ ID NO: 132156 - protein, 10 aa, synthetic construct
TGPRGDRQGI

SEQ ID NO: 132157 - protein, 10 aa, synthetic construct
TGLRGDRQGI

SEQ ID NO: 132158 - protein, 10 aa, synthetic construct
TGIRGDRQGI

SEQ ID NO: 132159 - protein, 10 aa, synthetic construct
TGMRGDRQGI

SEQ ID NO: 132160 - protein, 10 aa, synthetic construct
TGWRGDRQGI

SEQ ID NO: 132161 - protein, 10 aa, synthetic construct
TGFRGDRQGI

SEQ ID NO: 132162 - protein, 10 aa, synthetic construct
TGKRGDRQGI

SEQ ID NO: 132163 - protein, 10 aa, synthetic construct
TGRRGDRQGI

SEQ ID NO: 132164 - protein, 10 aa, synthetic construct
TGHRGDRQGI

SEQ ID NO: 132165 - protein, 10 aa, synthetic construct
TGSRGDRQGI

SEQ ID NO: 132166 - protein, 10 aa, synthetic construct
TGTRGDRQGI

SEQ ID NO: 132167 - protein, 10 aa, synthetic construct
TGYRGDRQGI

SEQ ID NO: 132168 - protein, 10 aa, synthetic construct
TGNRGDRQGI

SEQ ID NO: 132169 - protein, 10 aa, synthetic construct
TGQRGDRQGI

SEQ ID NO: 132170 - protein, 10 aa, synthetic construct
TGDRGDRQGI

SEQ ID NO: 132171 - protein, 10 aa, synthetic construct
TGERGDRQGI

SEQ ID NO: 132172 - protein, 10 aa, synthetic construct
TAGRGDRQGI

SEQ ID NO: 132173 - protein, 10 aa, synthetic construct
TAARGDRQGI

SEQ ID NO: 132174 - protein, 10 aa, synthetic construct
TAVRGDRQGI

SEQ ID NO: 132175 - protein, 10 aa, synthetic construct
TAPRGDRQGI

SEQ ID NO: 132176 - protein, 10 aa, synthetic construct
TALRGDRQGI

SEQ ID NO: 132177 - protein, 10 aa, synthetic construct
TAIRGDRQGI

SEQ ID NO: 132178 - protein, 10 aa, synthetic construct
TAMRGDRQGI

SEQ ID NO: 132179 - protein, 10 aa, synthetic construct
TAWRGDRQGI

SEQ ID NO: 132180 - protein, 10 aa, synthetic construct
TAFRGDRQGI

SEQ ID NO: 132181 - protein, 10 aa, synthetic construct
TAKRGDRQGI

SEQ ID NO: 132182 - protein, 10 aa, synthetic construct
TARRGDRQGI

SEQ ID NO: 132183 - protein, 10 aa, synthetic construct
TAHRGDRQGI

SEQ ID NO: 132184 - protein, 10 aa, synthetic construct
TASRGDRQGI

SEQ ID NO: 132185 - protein, 10 aa, synthetic construct
TATRGDRQGI

SEQ ID NO: 132186 - protein, 10 aa, synthetic construct
TAYRGDRQGI

SEQ ID NO: 132187 - protein, 10 aa, synthetic construct
TANRGDRQGI

SEQ ID NO: 132188 - protein, 10 aa, synthetic construct
TAQRGDRQGI

SEQ ID NO: 132189 - protein, 10 aa, synthetic construct
TADRGDRQGI

SEQ ID NO: 132190 - protein, 10 aa, synthetic construct
TAERGDRQGI

SEQ ID NO: 132191 - protein, 10 aa, synthetic construct
TVGRGDRQGI

SEQ ID NO: 132192 - protein, 10 aa, synthetic construct
TVARGDRQGI

SEQ ID NO: 132193 - protein, 10 aa, synthetic construct
TVVRGDRQGI

SEQ ID NO: 132194 - protein, 10 aa, synthetic construct
TVPRGDRQGI

SEQ ID NO: 132195 - protein, 10 aa, synthetic construct
TVLRGDRQGI

SEQ ID NO: 132196 - protein, 10 aa, synthetic construct
TVIRGDRQGI

SEQ ID NO: 132197 - protein, 10 aa, synthetic construct
TVMRGDRQGI

SEQ ID NO: 132198 - protein, 10 aa, synthetic construct
TVWRGDRQGI

SEQ ID NO: 132199 - protein, 10 aa, synthetic construct
TVFRGDRQGI

SEQ ID NO: 132200 - protein, 10 aa, synthetic construct
TVKRGDRQGI

SEQ ID NO: 132201 - protein, 10 aa, synthetic construct
TVRRGDRQGI

SEQ ID NO: 132202 - protein, 10 aa, synthetic construct
TVHRGDRQGI

SEQ ID NO: 132203 - protein, 10 aa, synthetic construct
TVSRGDRQGI

SEQ ID NO: 132204 - protein, 10 aa, synthetic construct
TVTRGDRQGI

SEQ ID NO: 132205 - protein, 10 aa, synthetic construct
TVYRGDRQGI

SEQ ID NO: 132206 - protein, 10 aa, synthetic construct
TVNRGDRQGI

SEQ ID NO: 132207 - protein, 10 aa, synthetic construct
TVQRGDRQGI

SEQ ID NO: 132208 - protein, 10 aa, synthetic construct
TVDRGDRQGI

SEQ ID NO: 132209 - protein, 10 aa, synthetic construct
TVERGDRQGI

SEQ ID NO: 132210 - protein, 10 aa, synthetic construct
TPGRGDRQGI

SEQ ID NO: 132211 - protein, 10 aa, synthetic construct
TPARGDRQGI

SEQ ID NO: 132212 - protein, 10 aa, synthetic construct
TPVRGDRQGI

SEQ ID NO: 132213 - protein, 10 aa, synthetic construct
TPPRGDRQGI

SEQ ID NO: 132214 - protein, 10 aa, synthetic construct
TPLRGDRQGI

SEQ ID NO: 132215 - protein, 10 aa, synthetic construct
TPIRGDRQGI

SEQ ID NO: 132216 - protein, 10 aa, synthetic construct
TPMRGDRQGI

SEQ ID NO: 132217 - protein, 10 aa, synthetic construct
TPWRGDRQGI

SEQ ID NO: 132218 - protein, 10 aa, synthetic construct
TPFRGDRQGI

SEQ ID NO: 132219 - protein, 10 aa, synthetic construct
TPKRGDRQGI

SEQ ID NO: 132220 - protein, 10 aa, synthetic construct
TPRRGDRQGI

SEQ ID NO: 132221 - protein, 10 aa, synthetic construct
TPHRGDRQGI

SEQ ID NO: 132222 - protein, 10 aa, synthetic construct
TPSRGDRQGI

SEQ ID NO: 132223 - protein, 10 aa, synthetic construct
TPTRGDRQGI

SEQ ID NO: 132224 - protein, 10 aa, synthetic construct
TPYRGDRQGI

SEQ ID NO: 132225 - protein, 10 aa, synthetic construct
TPNRGDRQGI

SEQ ID NO: 132226 - protein, 10 aa, synthetic construct
TPQRGDRQGI

SEQ ID NO: 132227 - protein, 10 aa, synthetic construct
TPDRGDRQGI

SEQ ID NO: 132228 - protein, 10 aa, synthetic construct
TPERGDRQGI

SEQ ID NO: 132229 - protein, 10 aa, synthetic construct
TLGRGDRQGI

SEQ ID NO: 132230 - protein, 10 aa, synthetic construct
TLARGDRQGI

SEQ ID NO: 132231 - protein, 10 aa, synthetic construct
TLVRGDRQGI

SEQ ID NO: 132232 - protein, 10 aa, synthetic construct
TLPRGDRQGI

SEQ ID NO: 132233 - protein, 10 aa, synthetic construct
TLLRGDRQGI

SEQ ID NO: 132234 - protein, 10 aa, synthetic construct
TLIRGDRQGI

SEQ ID NO: 132235 - protein, 10 aa, synthetic construct
TLMRGDRQGI

SEQ ID NO: 132236 - protein, 10 aa, synthetic construct
TLWRGDRQGI

SEQ ID NO: 132237 - protein, 10 aa, synthetic construct
TLFRGDRQGI

SEQ ID NO: 132238 - protein, 10 aa, synthetic construct
TLKRGDRQGI

SEQ ID NO: 132239 - protein, 10 aa, synthetic construct
TLRRGDRQGI

SEQ ID NO: 132240 - protein, 10 aa, synthetic construct
TLHRGDRQGI

SEQ ID NO: 132241 - protein, 10 aa, synthetic construct
TLSRGDRQGI

SEQ ID NO: 132242 - protein, 10 aa, synthetic construct
TLTRGDRQGI

SEQ ID NO: 132243 - protein, 10 aa, synthetic construct
TLYRGDRQGI

SEQ ID NO: 132244 - protein, 10 aa, synthetic construct
TLNRGDRQGI

SEQ ID NO: 132245 - protein, 10 aa, synthetic construct
TLQRGDRQGI

SEQ ID NO: 132246 - protein, 10 aa, synthetic construct
TLDRGDRQGI

SEQ ID NO: 132247 - protein, 10 aa, synthetic construct
TLERGDRQGI

SEQ ID NO: 132248 - protein, 10 aa, synthetic construct
TIGRGDRQGI

SEQ ID NO: 132249 - protein, 10 aa, synthetic construct
TIARGDRQGI

SEQ ID NO: 132250 - protein, 10 aa, synthetic construct
TIVRGDRQGI

SEQ ID NO: 132251 - protein, 10 aa, synthetic construct
TIPRGDRQGI

SEQ ID NO: 132252 - protein, 10 aa, synthetic construct
TILRGDRQGI

SEQ ID NO: 132253 - protein, 10 aa, synthetic construct
TIIRGDRQGI

SEQ ID NO: 132254 - protein, 10 aa, synthetic construct
TIMRGDRQGI

SEQ ID NO: 132255 - protein, 10 aa, synthetic construct
TIWRGDRQGI

SEQ ID NO: 132256 - protein, 10 aa, synthetic construct
TIFRGDRQGI

SEQ ID NO: 132257 - protein, 10 aa, synthetic construct
TIKRGDRQGI

SEQ ID NO: 132258 - protein, 10 aa, synthetic construct
TIRRGDRQGI

SEQ ID NO: 132259 - protein, 10 aa, synthetic construct
TIHRGDRQGI

SEQ ID NO: 132260 - protein, 10 aa, synthetic construct
TISRGDRQGI

SEQ ID NO: 132261 - protein, 10 aa, synthetic construct
TITRGDRQGI

SEQ ID NO: 132262 - protein, 10 aa, synthetic construct
TIYRGDRQGI

SEQ ID NO: 132263 - protein, 10 aa, synthetic construct
TINRGDRQGI

SEQ ID NO: 132264 - protein, 10 aa, synthetic construct
TIQRGDRQGI

SEQ ID NO: 132265 - protein, 10 aa, synthetic construct
TIDRGDRQGI

SEQ ID NO: 132266 - protein, 10 aa, synthetic construct
TIERGDRQGI

SEQ ID NO: 132267 - protein, 10 aa, synthetic construct
TMGRGDRQGI

SEQ ID NO: 132268 - protein, 10 aa, synthetic construct
TMARGDRQGI

SEQ ID NO: 132269 - protein, 10 aa, synthetic construct
TMVRGDRQGI

SEQ ID NO: 132270 - protein, 10 aa, synthetic construct
TMPRGDRQGI

SEQ ID NO: 132271 - protein, 10 aa, synthetic construct
TMLRGDRQGI

SEQ ID NO: 132272 - protein, 10 aa, synthetic construct
TMIRGDRQGI

SEQ ID NO: 132273 - protein, 10 aa, synthetic construct
TMMRGDRQGI

SEQ ID NO: 132274 - protein, 10 aa, synthetic construct
TMWRGDRQGI

SEQ ID NO: 132275 - protein, 10 aa, synthetic construct
TMFRGDRQGI

SEQ ID NO: 132276 - protein, 10 aa, synthetic construct
TMKRGDRQGI

SEQ ID NO: 132277 - protein, 10 aa, synthetic construct
TMRRGDRQGI

SEQ ID NO: 132278 - protein, 10 aa, synthetic construct
TMHRGDRQGI

SEQ ID NO: 132279 - protein, 10 aa, synthetic construct
TMSRGDRQGI

SEQ ID NO: 132280 - protein, 10 aa, synthetic construct
TMTRGDRQGI

SEQ ID NO: 132281 - protein, 10 aa, synthetic construct
TMYRGDRQGI

SEQ ID NO: 132282 - protein, 10 aa, synthetic construct
TMNRGDRQGI

SEQ ID NO: 132283 - protein, 10 aa, synthetic construct
TMQRGDRQGI

SEQ ID NO: 132284 - protein, 10 aa, synthetic construct
TMDRGDRQGI

SEQ ID NO: 132285 - protein, 10 aa, synthetic construct
TMERGDRQGI

SEQ ID NO: 132286 - protein, 10 aa, synthetic construct
TWGRGDRQGI

SEQ ID NO: 132287 - protein, 10 aa, synthetic construct
TWARGDRQGI

SEQ ID NO: 132288 - protein, 10 aa, synthetic construct
TWVRGDRQGI

SEQ ID NO: 132289 - protein, 10 aa, synthetic construct
TWPRGDRQGI

SEQ ID NO: 132290 - protein, 10 aa, synthetic construct
TWLRGDRQGI

SEQ ID NO: 132291 - protein, 10 aa, synthetic construct
TWIRGDRQGI

SEQ ID NO: 132292 - protein, 10 aa, synthetic construct
TWMRGDRQGI

SEQ ID NO: 132293 - protein, 10 aa, synthetic construct
TWWRGDRQGI

SEQ ID NO: 132294 - protein, 10 aa, synthetic construct
TWFRGDRQGI

SEQ ID NO: 132295 - protein, 10 aa, synthetic construct
TWKRGDRQGI

SEQ ID NO: 132296 - protein, 10 aa, synthetic construct
TWRRGDRQGI

SEQ ID NO: 132297 - protein, 10 aa, synthetic construct
TWHRGDRQGI

SEQ ID NO: 132298 - protein, 10 aa, synthetic construct
TWSRGDRQGI

SEQ ID NO: 132299 - protein, 10 aa, synthetic construct
TWTRGDRQGI

SEQ ID NO: 132300 - protein, 10 aa, synthetic construct
TWYRGDRQGI

SEQ ID NO: 132301 - protein, 10 aa, synthetic construct
TWNRGDRQGI

SEQ ID NO: 132302 - protein, 10 aa, synthetic construct
TWQRGDRQGI

SEQ ID NO: 132303 - protein, 10 aa, synthetic construct
TWDRGDRQGI

SEQ ID NO: 132304 - protein, 10 aa, synthetic construct
TWERGDRQGI

SEQ ID NO: 132305 - protein, 10 aa, synthetic construct
TFGRGDRQGI

SEQ ID NO: 132306 - protein, 10 aa, synthetic construct
TFARGDRQGI

SEQ ID NO: 132307 - protein, 10 aa, synthetic construct
TFVRGDRQGI

SEQ ID NO: 132308 - protein, 10 aa, synthetic construct
TFPRGDRQGI

SEQ ID NO: 132309 - protein, 10 aa, synthetic construct
TFLRGDRQGI

SEQ ID NO: 132310 - protein, 10 aa, synthetic construct
TFIRGDRQGI

SEQ ID NO: 132311 - protein, 10 aa, synthetic construct
TFMRGDRQGI

SEQ ID NO: 132312 - protein, 10 aa, synthetic construct
TFWRGDRQGI

SEQ ID NO: 132313 - protein, 10 aa, synthetic construct
TFFRGDRQGI

SEQ ID NO: 132314 - protein, 10 aa, synthetic construct
TFKRGDRQGI

SEQ ID NO: 132315 - protein, 10 aa, synthetic construct
TFRRGDRQGI

SEQ ID NO: 132316 - protein, 10 aa, synthetic construct
TFHRGDRQGI

SEQ ID NO: 132317 - protein, 10 aa, synthetic construct
TFSRGDRQGI

SEQ ID NO: 132318 - protein, 10 aa, synthetic construct
TFTRGDRQGI

SEQ ID NO: 132319 - protein, 10 aa, synthetic construct
TFYRGDRQGI

SEQ ID NO: 132320 - protein, 10 aa, synthetic construct
TFNRGDRQGI

SEQ ID NO: 132321 - protein, 10 aa, synthetic construct
TFQRGDRQGI

SEQ ID NO: 132322 - protein, 10 aa, synthetic construct
TFDRGDRQGI

SEQ ID NO: 132323 - protein, 10 aa, synthetic construct
TFERGDRQGI

SEQ ID NO: 132324 - protein, 10 aa, synthetic construct
TKGRGDRQGI

SEQ ID NO: 132325 - protein, 10 aa, synthetic construct
TKARGDRQGI

SEQ ID NO: 132326 - protein, 10 aa, synthetic construct
TKVRGDRQGI

SEQ ID NO: 132327 - protein, 10 aa, synthetic construct
TKPRGDRQGI

SEQ ID NO: 132328 - protein, 10 aa, synthetic construct
TKLRGDRQGI

SEQ ID NO: 132329 - protein, 10 aa, synthetic construct
TKIRGDRQGI

SEQ ID NO: 132330 - protein, 10 aa, synthetic construct
TKMRGDRQGI

SEQ ID NO: 132331 - protein, 10 aa, synthetic construct
TKWRGDRQGI

SEQ ID NO: 132332 - protein, 10 aa, synthetic construct
TKFRGDRQGI

SEQ ID NO: 132333 - protein, 10 aa, synthetic construct
TKKRGDRQGI

SEQ ID NO: 132334 - protein, 10 aa, synthetic construct
TKRRGDRQGI

SEQ ID NO: 132335 - protein, 10 aa, synthetic construct
TKHRGDRQGI

SEQ ID NO: 132336 - protein, 10 aa, synthetic construct
TKSRGDRQGI

SEQ ID NO: 132337 - protein, 10 aa, synthetic construct
TKTRGDRQGI

SEQ ID NO: 132338 - protein, 10 aa, synthetic construct
TKYRGDRQGI

SEQ ID NO: 132339 - protein, 10 aa, synthetic construct
TKNRGDRQGI

SEQ ID NO: 132340 - protein, 10 aa, synthetic construct
TKQRGDRQGI

SEQ ID NO: 132341 - protein, 10 aa, synthetic construct
TKDRGDRQGI

SEQ ID NO: 132342 - protein, 10 aa, synthetic construct
TKERGDRQGI

SEQ ID NO: 132343 - protein, 10 aa, synthetic construct
TRGRGDRQGI

SEQ ID NO: 132344 - protein, 10 aa, synthetic construct
TRARGDRQGI

SEQ ID NO: 132345 - protein, 10 aa, synthetic construct
TRVRGDRQGI

SEQ ID NO: 132346 - protein, 10 aa, synthetic construct
TRPRGDRQGI

SEQ ID NO: 132347 - protein, 10 aa, synthetic construct
TRLRGDRQGI

SEQ ID NO: 132348 - protein, 10 aa, synthetic construct
TRIRGDRQGI

SEQ ID NO: 132349 - protein, 10 aa, synthetic construct
TRMRGDRQGI

SEQ ID NO: 132350 - protein, 10 aa, synthetic construct
TRWRGDRQGI

SEQ ID NO: 132351 - protein, 10 aa, synthetic construct
TRFRGDRQGI

SEQ ID NO: 132352 - protein, 10 aa, synthetic construct
TRKRGDRQGI

SEQ ID NO: 132353 - protein, 10 aa, synthetic construct
TRRRGDRQGI

SEQ ID NO: 132354 - protein, 10 aa, synthetic construct
TRHRGDRQGI

SEQ ID NO: 132355 - protein, 10 aa, synthetic construct
TRSRGDRQGI

SEQ ID NO: 132356 - protein, 10 aa, synthetic construct
TRTRGDRQGI

SEQ ID NO: 132357 - protein, 10 aa, synthetic construct
TRYRGDRQGI

SEQ ID NO: 132358 - protein, 10 aa, synthetic construct
TRNRGDRQGI

SEQ ID NO: 132359 - protein, 10 aa, synthetic construct
TRQRGDRQGI

SEQ ID NO: 132360 - protein, 10 aa, synthetic construct
TRDRGDRQGI

SEQ ID NO: 132361 - protein, 10 aa, synthetic construct
TRERGDRQGI

SEQ ID NO: 132362 - protein, 10 aa, synthetic construct
THGRGDRQGI

SEQ ID NO: 132363 - protein, 10 aa, synthetic construct
THARGDRQGI

SEQ ID NO: 132364 - protein, 10 aa, synthetic construct
THVRGDRQGI

SEQ ID NO: 132365 - protein, 10 aa, synthetic construct
THPRGDRQGI

SEQ ID NO: 132366 - protein, 10 aa, synthetic construct
THLRGDRQGI

SEQ ID NO: 132367 - protein, 10 aa, synthetic construct
THIRGDRQGI

SEQ ID NO: 132368 - protein, 10 aa, synthetic construct
THMRGDRQGI

SEQ ID NO: 132369 - protein, 10 aa, synthetic construct
THWRGDRQGI

SEQ ID NO: 132370 - protein, 10 aa, synthetic construct
THFRGDRQGI

SEQ ID NO: 132371 - protein, 10 aa, synthetic construct
THKRGDRQGI

SEQ ID NO: 132372 - protein, 10 aa, synthetic construct
THRRGDRQGI

SEQ ID NO: 132373 - protein, 10 aa, synthetic construct
THHRGDRQGI

SEQ ID NO: 132374 - protein, 10 aa, synthetic construct
THSRGDRQGI

SEQ ID NO: 132375 - protein, 10 aa, synthetic construct
THTRGDRQGI

SEQ ID NO: 132376 - protein, 10 aa, synthetic construct
THYRGDRQGI

SEQ ID NO: 132377 - protein, 10 aa, synthetic construct
THNRGDRQGI

SEQ ID NO: 132378 - protein, 10 aa, synthetic construct
THQRGDRQGI

SEQ ID NO: 132379 - protein, 10 aa, synthetic construct
THDRGDRQGI

SEQ ID NO: 132380 - protein, 10 aa, synthetic construct
THERGDRQGI

SEQ ID NO: 132381 - protein, 10 aa, synthetic construct
TSGRGDRQGI

SEQ ID NO: 132382 - protein, 10 aa, synthetic construct
TSARGDRQGI

SEQ ID NO: 132383 - protein, 10 aa, synthetic construct
TSVRGDRQGI

SEQ ID NO: 132384 - protein, 10 aa, synthetic construct
TSPRGDRQGI

SEQ ID NO: 132385 - protein, 10 aa, synthetic construct
TSLRGDRQGI

SEQ ID NO: 132386 - protein, 10 aa, synthetic construct
TSIRGDRQGI

SEQ ID NO: 132387 - protein, 10 aa, synthetic construct
TSMRGDRQGI

SEQ ID NO: 132388 - protein, 10 aa, synthetic construct
TSWRGDRQGI

SEQ ID NO: 132389 - protein, 10 aa, synthetic construct
TSFRGDRQGI

SEQ ID NO: 132390 - protein, 10 aa, synthetic construct
TSKRGDRQGI

SEQ ID NO: 132391 - protein, 10 aa, synthetic construct
TSRRGDRQGI

SEQ ID NO: 132392 - protein, 10 aa, synthetic construct
TSHRGDRQGI

SEQ ID NO: 132393 - protein, 10 aa, synthetic construct
TSSRGDRQGI

SEQ ID NO: 132394 - protein, 10 aa, synthetic construct
TSTRGDRQGI

SEQ ID NO: 132395 - protein, 10 aa, synthetic construct
TSYRGDRQGI

SEQ ID NO: 132396 - protein, 10 aa, synthetic construct
TSNRGDRQGI

SEQ ID NO: 132397 - protein, 10 aa, synthetic construct
TSQRGDRQGI

SEQ ID NO: 132398 - protein, 10 aa, synthetic construct
TSDRGDRQGI

SEQ ID NO: 132399 - protein, 10 aa, synthetic construct
TSERGDRQGI

SEQ ID NO: 132400 - protein, 10 aa, synthetic construct
TTGRGDRQGI

SEQ ID NO: 132401 - protein, 10 aa, synthetic construct
TTARGDRQGI

SEQ ID NO: 132402 - protein, 10 aa, synthetic construct
TTVRGDRQGI

SEQ ID NO: 132403 - protein, 10 aa, synthetic construct
TTPRGDRQGI

SEQ ID NO: 132404 - protein, 10 aa, synthetic construct
TTLRGDRQGI

SEQ ID NO: 132405 - protein, 10 aa, synthetic construct
TTIRGDRQGI

SEQ ID NO: 132406 - protein, 10 aa, synthetic construct
TTMRGDRQGI

SEQ ID NO: 132407 - protein, 10 aa, synthetic construct
TTWRGDRQGI

SEQ ID NO: 132408 - protein, 10 aa, synthetic construct
TTFRGDRQGI

SEQ ID NO: 132409 - protein, 10 aa, synthetic construct
TTKRGDRQGI

SEQ ID NO: 132410 - protein, 10 aa, synthetic construct
TTRRGDRQGI

SEQ ID NO: 132411 - protein, 10 aa, synthetic construct
TTHRGDRQGI

SEQ ID NO: 132412 - protein, 10 aa, synthetic construct
TTSRGDRQGI

SEQ ID NO: 132413 - protein, 10 aa, synthetic construct
TTTRGDRQGI

SEQ ID NO: 132414 - protein, 10 aa, synthetic construct
TTYRGDRQGI

SEQ ID NO: 132415 - protein, 10 aa, synthetic construct
TTNRGDRQGI

SEQ ID NO: 132416 - protein, 10 aa, synthetic construct
TTQRGDRQGI

SEQ ID NO: 132417 - protein, 10 aa, synthetic construct
TTDRGDRQGI

SEQ ID NO: 132418 - protein, 10 aa, synthetic construct
TTERGDRQGI

SEQ ID NO: 132419 - protein, 10 aa, synthetic construct
TYGRGDRQGI

SEQ ID NO: 132420 - protein, 10 aa, synthetic construct
TYARGDRQGI

SEQ ID NO: 132421 - protein, 10 aa, synthetic construct
TYVRGDRQGI

SEQ ID NO: 132422 - protein, 10 aa, synthetic construct
TYPRGDRQGI

SEQ ID NO: 132423 - protein, 10 aa, synthetic construct
TYLRGDRQGI

SEQ ID NO: 132424 - protein, 10 aa, synthetic construct
TYIRGDRQGI

SEQ ID NO: 132425 - protein, 10 aa, synthetic construct
TYMRGDRQGI

SEQ ID NO: 132426 - protein, 10 aa, synthetic construct
TYWRGDRQGI

SEQ ID NO: 132427 - protein, 10 aa, synthetic construct
TYFRGDRQGI

SEQ ID NO: 132428 - protein, 10 aa, synthetic construct
TYKRGDRQGI

SEQ ID NO: 132429 - protein, 10 aa, synthetic construct
TYRRGDRQGI

SEQ ID NO: 132430 - protein, 10 aa, synthetic construct
TYHRGDRQGI

SEQ ID NO: 132431 - protein, 10 aa, synthetic construct
TYSRGDRQGI

SEQ ID NO: 132432 - protein, 10 aa, synthetic construct
TYTRGDRQGI

SEQ ID NO: 132433 - protein, 10 aa, synthetic construct
TYYRGDRQGI

SEQ ID NO: 132434 - protein, 10 aa, synthetic construct
TYNRGDRQGI

SEQ ID NO: 132435 - protein, 10 aa, synthetic construct
TYQRGDRQGI

SEQ ID NO: 132436 - protein, 10 aa, synthetic construct
TYDRGDRQGI

SEQ ID NO: 132437 - protein, 10 aa, synthetic construct
TYERGDRQGI

SEQ ID NO: 132438 - protein, 10 aa, synthetic construct
TNGRGDRQGI

SEQ ID NO: 132439 - protein, 10 aa, synthetic construct
TNARGDRQGI

SEQ ID NO: 132440 - protein, 10 aa, synthetic construct
TNVRGDRQGI

SEQ ID NO: 132441 - protein, 10 aa, synthetic construct
TNPRGDRQGI

SEQ ID NO: 132442 - protein, 10 aa, synthetic construct
TNLRGDRQGI

SEQ ID NO: 132443 - protein, 10 aa, synthetic construct
TNIRGDRQGI

SEQ ID NO: 132444 - protein, 10 aa, synthetic construct
TNMRGDRQGI

SEQ ID NO: 132445 - protein, 10 aa, synthetic construct
TNWRGDRQGI

SEQ ID NO: 132446 - protein, 10 aa, synthetic construct
TNFRGDRQGI

SEQ ID NO: 132447 - protein, 10 aa, synthetic construct
TNKRGDRQGI

SEQ ID NO: 132448 - protein, 10 aa, synthetic construct
TNRRGDRQGI

SEQ ID NO: 132449 - protein, 10 aa, synthetic construct
TNHRGDRQGI

SEQ ID NO: 132450 - protein, 10 aa, synthetic construct
TNSRGDRQGI

SEQ ID NO: 132451 - protein, 10 aa, synthetic construct
TNTRGDRQGI

SEQ ID NO: 132452 - protein, 10 aa, synthetic construct
TNYRGDRQGI

SEQ ID NO: 132453 - protein, 10 aa, synthetic construct
TNNRGDRQGI

SEQ ID NO: 132454 - protein, 10 aa, synthetic construct
TNQRGDRQGI

SEQ ID NO: 132455 - protein, 10 aa, synthetic construct
TNDRGDRQGI

SEQ ID NO: 132456 - protein, 10 aa, synthetic construct
TNERGDRQGI

SEQ ID NO: 132457 - protein, 10 aa, synthetic construct
TQGRGDRQGI

SEQ ID NO: 132458 - protein, 10 aa, synthetic construct
TQARGDRQGI

SEQ ID NO: 132459 - protein, 10 aa, synthetic construct
TQVRGDRQGI

SEQ ID NO: 132460 - protein, 10 aa, synthetic construct
TQPRGDRQGI

SEQ ID NO: 132461 - protein, 10 aa, synthetic construct
TQLRGDRQGI

SEQ ID NO: 132462 - protein, 10 aa, synthetic construct
TQIRGDRQGI

SEQ ID NO: 132463 - protein, 10 aa, synthetic construct
TQMRGDRQGI

SEQ ID NO: 132464 - protein, 10 aa, synthetic construct
TQWRGDRQGI

SEQ ID NO: 132465 - protein, 10 aa, synthetic construct
TQFRGDRQGI

SEQ ID NO: 132466 - protein, 10 aa, synthetic construct
TQKRGDRQGI

SEQ ID NO: 132467 - protein, 10 aa, synthetic construct
TQRRGDRQGI

SEQ ID NO: 132468 - protein, 10 aa, synthetic construct
TQHRGDRQGI

SEQ ID NO: 132469 - protein, 10 aa, synthetic construct
TQSRGDRQGI

SEQ ID NO: 132470 - protein, 10 aa, synthetic construct
TQTRGDRQGI

SEQ ID NO: 132471 - protein, 10 aa, synthetic construct
TQYRGDRQGI

SEQ ID NO: 132472 - protein, 10 aa, synthetic construct
TQNRGDRQGI

SEQ ID NO: 132473 - protein, 10 aa, synthetic construct
TQQRGDRQGI

SEQ ID NO: 132474 - protein, 10 aa, synthetic construct
TQDRGDRQGI

SEQ ID NO: 132475 - protein, 10 aa, synthetic construct
TQERGDRQGI

SEQ ID NO: 132476 - protein, 10 aa, synthetic construct
TDGRGDRQGI

SEQ ID NO: 132477 - protein, 10 aa, synthetic construct
TDARGDRQGI

SEQ ID NO: 132478 - protein, 10 aa, synthetic construct
TDVRGDRQGI

SEQ ID NO: 132479 - protein, 10 aa, synthetic construct
TDPRGDRQGI

SEQ ID NO: 132480 - protein, 10 aa, synthetic construct
TDLRGDRQGI

SEQ ID NO: 132481 - protein, 10 aa, synthetic construct
TDIRGDRQGI

SEQ ID NO: 132482 - protein, 10 aa, synthetic construct
TDMRGDRQGI

SEQ ID NO: 132483 - protein, 10 aa, synthetic construct
TDWRGDRQGI

SEQ ID NO: 132484 - protein, 10 aa, synthetic construct
TDFRGDRQGI

SEQ ID NO: 132485 - protein, 10 aa, synthetic construct
TDKRGDRQGI

SEQ ID NO: 132486 - protein, 10 aa, synthetic construct
TDRRGDRQGI

SEQ ID NO: 132487 - protein, 10 aa, synthetic construct
TDHRGDRQGI

SEQ ID NO: 132488 - protein, 10 aa, synthetic construct
TDSRGDRQGI

SEQ ID NO: 132489 - protein, 10 aa, synthetic construct
TDTRGDRQGI

SEQ ID NO: 132490 - protein, 10 aa, synthetic construct
TDYRGDRQGI

SEQ ID NO: 132491 - protein, 10 aa, synthetic construct
TDNRGDRQGI

SEQ ID NO: 132492 - protein, 10 aa, synthetic construct
TDQRGDRQGI

SEQ ID NO: 132493 - protein, 10 aa, synthetic construct
TDDRGDRQGI

SEQ ID NO: 132494 - protein, 10 aa, synthetic construct
TDERGDRQGI

SEQ ID NO: 132495 - protein, 10 aa, synthetic construct
TEGRGDRQGI

SEQ ID NO: 132496 - protein, 10 aa, synthetic construct
TEARGDRQGI

SEQ ID NO: 132497 - protein, 10 aa, synthetic construct
TEVRGDRQGI

SEQ ID NO: 132498 - protein, 10 aa, synthetic construct
TEPRGDRQGI

SEQ ID NO: 132499 - protein, 10 aa, synthetic construct
TELRGDRQGI

SEQ ID NO: 132500 - protein, 10 aa, synthetic construct
TEIRGDRQGI

SEQ ID NO: 132501 - protein, 10 aa, synthetic construct
TEMRGDRQGI

SEQ ID NO: 132502 - protein, 10 aa, synthetic construct
TEWRGDRQGI

SEQ ID NO: 132503 - protein, 10 aa, synthetic construct
TEFRGDRQGI

SEQ ID NO: 132504 - protein, 10 aa, synthetic construct
TEKRGDRQGI

SEQ ID NO: 132505 - protein, 10 aa, synthetic construct
TERRGDRQGI

SEQ ID NO: 132506 - protein, 10 aa, synthetic construct
TEHRGDRQGI

SEQ ID NO: 132507 - protein, 10 aa, synthetic construct
TESRGDRQGI

SEQ ID NO: 132508 - protein, 10 aa, synthetic construct
TETRGDRQGI

SEQ ID NO: 132509 - protein, 10 aa, synthetic construct
TEYRGDRQGI

SEQ ID NO: 132510 - protein, 10 aa, synthetic construct
TENRGDRQGI

SEQ ID NO: 132511 - protein, 10 aa, synthetic construct
TEQRGDRQGI

SEQ ID NO: 132512 - protein, 10 aa, synthetic construct
TEDRGDRQGI

SEQ ID NO: 132513 - protein, 10 aa, synthetic construct
TEERGDRQGI

SEQ ID NO: 132514 - protein, 10 aa, synthetic construct
AGGRGDRQGI

SEQ ID NO: 132515 - protein, 10 aa, synthetic construct
AGARGDRQGI

SEQ ID NO: 132516 - protein, 10 aa, synthetic construct
AGVRGDRQGI

SEQ ID NO: 132517 - protein, 10 aa, synthetic construct
AGPRGDRQGI

SEQ ID NO: 132518 - protein, 10 aa, synthetic construct
AGLRGDRQGI

SEQ ID NO: 132519 - protein, 10 aa, synthetic construct
AGIRGDRQGI

SEQ ID NO: 132520 - protein, 10 aa, synthetic construct
AGMRGDRQGI

SEQ ID NO: 132521 - protein, 10 aa, synthetic construct
AGWRGDRQGI

SEQ ID NO: 132522 - protein, 10 aa, synthetic construct
AGFRGDRQGI

SEQ ID NO: 132523 - protein, 10 aa, synthetic construct
AGKRGDRQGI

SEQ ID NO: 132524 - protein, 10 aa, synthetic construct
AGRRGDRQGI

SEQ ID NO: 132525 - protein, 10 aa, synthetic construct
AGHRGDRQGI

SEQ ID NO: 132526 - protein, 10 aa, synthetic construct
AGSRGDRQGI

SEQ ID NO: 132527 - protein, 10 aa, synthetic construct
AGTRGDRQGI

SEQ ID NO: 132528 - protein, 10 aa, synthetic construct
AGYRGDRQGI

SEQ ID NO: 132529 - protein, 10 aa, synthetic construct
AGNRGDRQGI

SEQ ID NO: 132530 - protein, 10 aa, synthetic construct
AGQRGDRQGI

SEQ ID NO: 132531 - protein, 10 aa, synthetic construct
AGDRGDRQGI

SEQ ID NO: 132532 - protein, 10 aa, synthetic construct
AGERGDRQGI

SEQ ID NO: 132533 - protein, 10 aa, synthetic construct
AAGRGDRQGI

SEQ ID NO: 132534 - protein, 10 aa, synthetic construct
AAARGDRQGI

SEQ ID NO: 132535 - protein, 10 aa, synthetic construct
AAVRGDRQGI

SEQ ID NO: 132536 - protein, 10 aa, synthetic construct
AAPRGDRQGI

SEQ ID NO: 132537 - protein, 10 aa, synthetic construct
AALRGDRQGI

SEQ ID NO: 132538 - protein, 10 aa, synthetic construct
AAIRGDRQGI

SEQ ID NO: 132539 - protein, 10 aa, synthetic construct
AAMRGDRQGI

SEQ ID NO: 132540 - protein, 10 aa, synthetic construct
AAWRGDRQGI

SEQ ID NO: 132541 - protein, 10 aa, synthetic construct
AAFRGDRQGI

SEQ ID NO: 132542 - protein, 10 aa, synthetic construct
AAKRGDRQGI

SEQ ID NO: 132543 - protein, 10 aa, synthetic construct
AARRGDRQGI

SEQ ID NO: 132544 - protein, 10 aa, synthetic construct
AAHRGDRQGI

SEQ ID NO: 132545 - protein, 10 aa, synthetic construct
AASRGDRQGI

SEQ ID NO: 132546 - protein, 10 aa, synthetic construct
AATRGDRQGI

SEQ ID NO: 132547 - protein, 10 aa, synthetic construct
AAYRGDRQGI

SEQ ID NO: 132548 - protein, 10 aa, synthetic construct
AANRGDRQGI

SEQ ID NO: 132549 - protein, 10 aa, synthetic construct
AAQRGDRQGI

SEQ ID NO: 132550 - protein, 10 aa, synthetic construct
AADRGDRQGI

SEQ ID NO: 132551 - protein, 10 aa, synthetic construct
AAERGDRQGI

SEQ ID NO: 132552 - protein, 10 aa, synthetic construct
AVGRGDRQGI

SEQ ID NO: 132553 - protein, 10 aa, synthetic construct
AVARGDRQGI

SEQ ID NO: 132554 - protein, 10 aa, synthetic construct
AVVRGDRQGI

SEQ ID NO: 132555 - protein, 10 aa, synthetic construct
AVPRGDRQGI

SEQ ID NO: 132556 - protein, 10 aa, synthetic construct
AVLRGDRQGI

SEQ ID NO: 132557 - protein, 10 aa, synthetic construct
AVIRGDRQGI

SEQ ID NO: 132558 - protein, 10 aa, synthetic construct
AVMRGDRQGI

SEQ ID NO: 132559 - protein, 10 aa, synthetic construct
AVWRGDRQGI

SEQ ID NO: 132560 - protein, 10 aa, synthetic construct
AVFRGDRQGI

SEQ ID NO: 132561 - protein, 10 aa, synthetic construct
AVKRGDRQGI

SEQ ID NO: 132562 - protein, 10 aa, synthetic construct
AVRRGDRQGI

SEQ ID NO: 132563 - protein, 10 aa, synthetic construct
AVHRGDRQGI

SEQ ID NO: 132564 - protein, 10 aa, synthetic construct
AVSRGDRQGI

SEQ ID NO: 132565 - protein, 10 aa, synthetic construct
AVTRGDRQGI

SEQ ID NO: 132566 - protein, 10 aa, synthetic construct
AVYRGDRQGI

SEQ ID NO: 132567 - protein, 10 aa, synthetic construct
AVNRGDRQGI

SEQ ID NO: 132568 - protein, 10 aa, synthetic construct
AVQRGDRQGI

SEQ ID NO: 132569 - protein, 10 aa, synthetic construct
AVDRGDRQGI

SEQ ID NO: 132570 - protein, 10 aa, synthetic construct
AVERGDRQGI

SEQ ID NO: 132571 - protein, 10 aa, synthetic construct
APGRGDRQGI

SEQ ID NO: 132572 - protein, 10 aa, synthetic construct
APARGDRQGI

SEQ ID NO: 132573 - protein, 10 aa, synthetic construct
APVRGDRQGI

SEQ ID NO: 132574 - protein, 10 aa, synthetic construct
APPRGDRQGI

SEQ ID NO: 132575 - protein, 10 aa, synthetic construct
APLRGDRQGI

SEQ ID NO: 132576 - protein, 10 aa, synthetic construct
APIRGDRQGI

SEQ ID NO: 132577 - protein, 10 aa, synthetic construct
APMRGDRQGI

SEQ ID NO: 132578 - protein, 10 aa, synthetic construct
APWRGDRQGI

SEQ ID NO: 132579 - protein, 10 aa, synthetic construct
APFRGDRQGI

SEQ ID NO: 132580 - protein, 10 aa, synthetic construct
APKRGDRQGI

SEQ ID NO: 132581 - protein, 10 aa, synthetic construct
APRRGDRQGI

SEQ ID NO: 132582 - protein, 10 aa, synthetic construct
APHRGDRQGI

SEQ ID NO: 132583 - protein, 10 aa, synthetic construct
APSRGDRQGI

SEQ ID NO: 132584 - protein, 10 aa, synthetic construct
APTRGDRQGI

SEQ ID NO: 132585 - protein, 10 aa, synthetic construct
APYRGDRQGI

SEQ ID NO: 132586 - protein, 10 aa, synthetic construct
APNRGDRQGI

SEQ ID NO: 132587 - protein, 10 aa, synthetic construct
APQRGDRQGI

SEQ ID NO: 132588 - protein, 10 aa, synthetic construct
APDRGDRQGI

SEQ ID NO: 132589 - protein, 10 aa, synthetic construct
APERGDRQGI

SEQ ID NO: 132590 - protein, 10 aa, synthetic construct
ALGRGDRQGI

SEQ ID NO: 132591 - protein, 10 aa, synthetic construct
ALARGDRQGI

SEQ ID NO: 132592 - protein, 10 aa, synthetic construct
ALVRGDRQGI

SEQ ID NO: 132593 - protein, 10 aa, synthetic construct
ALPRGDRQGI

SEQ ID NO: 132594 - protein, 10 aa, synthetic construct
ALLRGDRQGI

SEQ ID NO: 132595 - protein, 10 aa, synthetic construct
ALIRGDRQGI

SEQ ID NO: 132596 - protein, 10 aa, synthetic construct
ALMRGDRQGI

SEQ ID NO: 132597 - protein, 10 aa, synthetic construct
ALWRGDRQGI

SEQ ID NO: 132598 - protein, 10 aa, synthetic construct
ALFRGDRQGI

SEQ ID NO: 132599 - protein, 10 aa, synthetic construct
ALKRGDRQGI

SEQ ID NO: 132600 - protein, 10 aa, synthetic construct
ALRRGDRQGI

SEQ ID NO: 132601 - protein, 10 aa, synthetic construct
ALHRGDRQGI

SEQ ID NO: 132602 - protein, 10 aa, synthetic construct
ALSRGDRQGI

SEQ ID NO: 132603 - protein, 10 aa, synthetic construct
ALTRGDRQGI

SEQ ID NO: 132604 - protein, 10 aa, synthetic construct
ALYRGDRQGI

SEQ ID NO: 132605 - protein, 10 aa, synthetic construct
ALNRGDRQGI

SEQ ID NO: 132606 - protein, 10 aa, synthetic construct
ALQRGDRQGI

SEQ ID NO: 132607 - protein, 10 aa, synthetic construct
ALDRGDRQGI

SEQ ID NO: 132608 - protein, 10 aa, synthetic construct
ALERGDRQGI

SEQ ID NO: 132609 - protein, 10 aa, synthetic construct
AIGRGDRQGI

SEQ ID NO: 132610 - protein, 10 aa, synthetic construct
AIARGDRQGI

SEQ ID NO: 132611 - protein, 10 aa, synthetic construct
AIVRGDRQGI

SEQ ID NO: 132612 - protein, 10 aa, synthetic construct
AIPRGDRQGI

SEQ ID NO: 132613 - protein, 10 aa, synthetic construct
AILRGDRQGI

SEQ ID NO: 132614 - protein, 10 aa, synthetic construct
AIIRGDRQGI

SEQ ID NO: 132615 - protein, 10 aa, synthetic construct
AIMRGDRQGI

SEQ ID NO: 132616 - protein, 10 aa, synthetic construct
AIWRGDRQGI

SEQ ID NO: 132617 - protein, 10 aa, synthetic construct
AIFRGDRQGI

SEQ ID NO: 132618 - protein, 10 aa, synthetic construct
AIKRGDRQGI

SEQ ID NO: 132619 - protein, 10 aa, synthetic construct
AIRRGDRQGI

SEQ ID NO: 132620 - protein, 10 aa, synthetic construct
AIHRGDRQGI

SEQ ID NO: 132621 - protein, 10 aa, synthetic construct
AISRGDRQGI

SEQ ID NO: 132622 - protein, 10 aa, synthetic construct
AITRGDRQGI

SEQ ID NO: 132623 - protein, 10 aa, synthetic construct
AIYRGDRQGI

SEQ ID NO: 132624 - protein, 10 aa, synthetic construct
AINRGDRQGI

SEQ ID NO: 132625 - protein, 10 aa, synthetic construct
AIQRGDRQGI

SEQ ID NO: 132626 - protein, 10 aa, synthetic construct
AIDRGDRQGI

SEQ ID NO: 132627 - protein, 10 aa, synthetic construct
AIERGDRQGI

SEQ ID NO: 132628 - protein, 10 aa, synthetic construct
AMGRGDRQGI

SEQ ID NO: 132629 - protein, 10 aa, synthetic construct
AMARGDRQGI

SEQ ID NO: 132630 - protein, 10 aa, synthetic construct
AMVRGDRQGI

SEQ ID NO: 132631 - protein, 10 aa, synthetic construct
AMPRGDRQGI

SEQ ID NO: 132632 - protein, 10 aa, synthetic construct
AMLRGDRQGI

SEQ ID NO: 132633 - protein, 10 aa, synthetic construct
AMIRGDRQGI

SEQ ID NO: 132634 - protein, 10 aa, synthetic construct
AMMRGDRQGI

SEQ ID NO: 132635 - protein, 10 aa, synthetic construct
AMWRGDRQGI

SEQ ID NO: 132636 - protein, 10 aa, synthetic construct
AMFRGDRQGI

SEQ ID NO: 132637 - protein, 10 aa, synthetic construct
AMKRGDRQGI

SEQ ID NO: 132638 - protein, 10 aa, synthetic construct
AMRRGDRQGI

SEQ ID NO: 132639 - protein, 10 aa, synthetic construct
AMHRGDRQGI

SEQ ID NO: 132640 - protein, 10 aa, synthetic construct
AMSRGDRQGI

SEQ ID NO: 132641 - protein, 10 aa, synthetic construct
AMTRGDRQGI

SEQ ID NO: 132642 - protein, 10 aa, synthetic construct
AMYRGDRQGI

SEQ ID NO: 132643 - protein, 10 aa, synthetic construct
AMNRGDRQGI

SEQ ID NO: 132644 - protein, 10 aa, synthetic construct
AMQRGDRQGI

SEQ ID NO: 132645 - protein, 10 aa, synthetic construct
AMDRGDRQGI

SEQ ID NO: 132646 - protein, 10 aa, synthetic construct
AMERGDRQGI

SEQ ID NO: 132647 - protein, 10 aa, synthetic construct
AWGRGDRQGI

SEQ ID NO: 132648 - protein, 10 aa, synthetic construct
AWARGDRQGI

SEQ ID NO: 132649 - protein, 10 aa, synthetic construct
AWVRGDRQGI

SEQ ID NO: 132650 - protein, 10 aa, synthetic construct
AWPRGDRQGI

SEQ ID NO: 132651 - protein, 10 aa, synthetic construct
AWLRGDRQGI

SEQ ID NO: 132652 - protein, 10 aa, synthetic construct
AWIRGDRQGI

SEQ ID NO: 132653 - protein, 10 aa, synthetic construct
AWMRGDRQGI

SEQ ID NO: 132654 - protein, 10 aa, synthetic construct
AWWRGDRQGI

SEQ ID NO: 132655 - protein, 10 aa, synthetic construct
AWFRGDRQGI

SEQ ID NO: 132656 - protein, 10 aa, synthetic construct
AWKRGDRQGI

SEQ ID NO: 132657 - protein, 10 aa, synthetic construct
AWRRGDRQGI

SEQ ID NO: 132658 - protein, 10 aa, synthetic construct
AWHRGDRQGI

SEQ ID NO: 132659 - protein, 10 aa, synthetic construct
AWSRGDRQGI

SEQ ID NO: 132660 - protein, 10 aa, synthetic construct
AWTRGDRQGI

SEQ ID NO: 132661 - protein, 10 aa, synthetic construct
AWYRGDRQGI

SEQ ID NO: 132662 - protein, 10 aa, synthetic construct
AWNRGDRQGI

SEQ ID NO: 132663 - protein, 10 aa, synthetic construct
AWQRGDRQGI

SEQ ID NO: 132664 - protein, 10 aa, synthetic construct
AWDRGDRQGI

SEQ ID NO: 132665 - protein, 10 aa, synthetic construct
AWERGDRQGI

SEQ ID NO: 132666 - protein, 10 aa, synthetic construct
AFGRGDRQGI

SEQ ID NO: 132667 - protein, 10 aa, synthetic construct
AFARGDRQGI

SEQ ID NO: 132668 - protein, 10 aa, synthetic construct
AFVRGDRQGI

SEQ ID NO: 132669 - protein, 10 aa, synthetic construct
AFPRGDRQGI

SEQ ID NO: 132670 - protein, 10 aa, synthetic construct
AFLRGDRQGI

SEQ ID NO: 132671 - protein, 10 aa, synthetic construct
AFIRGDRQGI

SEQ ID NO: 132672 - protein, 10 aa, synthetic construct
AFMRGDRQGI

SEQ ID NO: 132673 - protein, 10 aa, synthetic construct
AFWRGDRQGI

SEQ ID NO: 132674 - protein, 10 aa, synthetic construct
AFFRGDRQGI

SEQ ID NO: 132675 - protein, 10 aa, synthetic construct
AFKRGDRQGI

SEQ ID NO: 132676 - protein, 10 aa, synthetic construct
AFRRGDRQGI

SEQ ID NO: 132677 - protein, 10 aa, synthetic construct
AFHRGDRQGI

SEQ ID NO: 132678 - protein, 10 aa, synthetic construct
AFSRGDRQGI

SEQ ID NO: 132679 - protein, 10 aa, synthetic construct
AFTRGDRQGI

SEQ ID NO: 132680 - protein, 10 aa, synthetic construct
AFYRGDRQGI

SEQ ID NO: 132681 - protein, 10 aa, synthetic construct
AFNRGDRQGI

SEQ ID NO: 132682 - protein, 10 aa, synthetic construct
AFQRGDRQGI

SEQ ID NO: 132683 - protein, 10 aa, synthetic construct
AFDRGDRQGI

SEQ ID NO: 132684 - protein, 10 aa, synthetic construct
AFERGDRQGI

SEQ ID NO: 132685 - protein, 10 aa, synthetic construct
AKGRGDRQGI

SEQ ID NO: 132686 - protein, 10 aa, synthetic construct
AKARGDRQGI

SEQ ID NO: 132687 - protein, 10 aa, synthetic construct
AKVRGDRQGI

SEQ ID NO: 132688 - protein, 10 aa, synthetic construct
AKPRGDRQGI

SEQ ID NO: 132689 - protein, 10 aa, synthetic construct
AKLRGDRQGI

SEQ ID NO: 132690 - protein, 10 aa, synthetic construct
AKIRGDRQGI

SEQ ID NO: 132691 - protein, 10 aa, synthetic construct
AKMRGDRQGI

SEQ ID NO: 132692 - protein, 10 aa, synthetic construct
AKWRGDRQGI

SEQ ID NO: 132693 - protein, 10 aa, synthetic construct
AKFRGDRQGI

SEQ ID NO: 132694 - protein, 10 aa, synthetic construct
AKKRGDRQGI

SEQ ID NO: 132695 - protein, 10 aa, synthetic construct
AKRRGDRQGI

SEQ ID NO: 132696 - protein, 10 aa, synthetic construct
AKHRGDRQGI

SEQ ID NO: 132697 - protein, 10 aa, synthetic construct
AKSRGDRQGI

SEQ ID NO: 132698 - protein, 10 aa, synthetic construct
AKTRGDRQGI

SEQ ID NO: 132699 - protein, 10 aa, synthetic construct
AKYRGDRQGI

SEQ ID NO: 132700 - protein, 10 aa, synthetic construct
AKNRGDRQGI

SEQ ID NO: 132701 - protein, 10 aa, synthetic construct
AKQRGDRQGI

SEQ ID NO: 132702 - protein, 10 aa, synthetic construct
AKDRGDRQGI

SEQ ID NO: 132703 - protein, 10 aa, synthetic construct
AKERGDRQGI

SEQ ID NO: 132704 - protein, 10 aa, synthetic construct
ARGRGDRQGI

SEQ ID NO: 132705 - protein, 10 aa, synthetic construct
ARARGDRQGI

SEQ ID NO: 132706 - protein, 10 aa, synthetic construct
ARVRGDRQGI

SEQ ID NO: 132707 - protein, 10 aa, synthetic construct
ARPRGDRQGI

SEQ ID NO: 132708 - protein, 10 aa, synthetic construct
ARLRGDRQGI

SEQ ID NO: 132709 - protein, 10 aa, synthetic construct
ARIRGDRQGI

SEQ ID NO: 132710 - protein, 10 aa, synthetic construct
ARMRGDRQGI

SEQ ID NO: 132711 - protein, 10 aa, synthetic construct
ARWRGDRQGI

SEQ ID NO: 132712 - protein, 10 aa, synthetic construct
ARFRGDRQGI

SEQ ID NO: 132713 - protein, 10 aa, synthetic construct
ARKRGDRQGI

SEQ ID NO: 132714 - protein, 10 aa, synthetic construct
ARRRGDRQGI

SEQ ID NO: 132715 - protein, 10 aa, synthetic construct
ARHRGDRQGI

SEQ ID NO: 132716 - protein, 10 aa, synthetic construct
ARSRGDRQGI

SEQ ID NO: 132717 - protein, 10 aa, synthetic construct
ARTRGDRQGI

SEQ ID NO: 132718 - protein, 10 aa, synthetic construct
ARYRGDRQGI

SEQ ID NO: 132719 - protein, 10 aa, synthetic construct
ARNRGDRQGI

SEQ ID NO: 132720 - protein, 10 aa, synthetic construct
ARQRGDRQGI

SEQ ID NO: 132721 - protein, 10 aa, synthetic construct
ARDRGDRQGI

SEQ ID NO: 132722 - protein, 10 aa, synthetic construct
ARERGDRQGI

SEQ ID NO: 132723 - protein, 10 aa, synthetic construct
AHGRGDRQGI

SEQ ID NO: 132724 - protein, 10 aa, synthetic construct
AHARGDRQGI

SEQ ID NO: 132725 - protein, 10 aa, synthetic construct
AHVRGDRQGI

SEQ ID NO: 132726 - protein, 10 aa, synthetic construct
AHPRGDRQGI

SEQ ID NO: 132727 - protein, 10 aa, synthetic construct
AHLRGDRQGI

SEQ ID NO: 132728 - protein, 10 aa, synthetic construct
AHIRGDRQGI

SEQ ID NO: 132729 - protein, 10 aa, synthetic construct
AHMRGDRQGI

SEQ ID NO: 132730 - protein, 10 aa, synthetic construct
AHWRGDRQGI

SEQ ID NO: 132731 - protein, 10 aa, synthetic construct
AHFRGDRQGI

SEQ ID NO: 132732 - protein, 10 aa, synthetic construct
AHKRGDRQGI

SEQ ID NO: 132733 - protein, 10 aa, synthetic construct
AHRRGDRQGI

SEQ ID NO: 132734 - protein, 10 aa, synthetic construct
AHHRGDRQGI

SEQ ID NO: 132735 - protein, 10 aa, synthetic construct
AHSRGDRQGI

SEQ ID NO: 132736 - protein, 10 aa, synthetic construct
AHTRGDRQGI

SEQ ID NO: 132737 - protein, 10 aa, synthetic construct
AHYRGDRQGI

SEQ ID NO: 132738 - protein, 10 aa, synthetic construct
AHNRGDRQGI

SEQ ID NO: 132739 - protein, 10 aa, synthetic construct
AHQRGDRQGI

SEQ ID NO: 132740 - protein, 10 aa, synthetic construct
AHDRGDRQGI

SEQ ID NO: 132741 - protein, 10 aa, synthetic construct
AHERGDRQGI

SEQ ID NO: 132742 - protein, 10 aa, synthetic construct
ASGRGDRQGI

SEQ ID NO: 132743 - protein, 10 aa, synthetic construct
ASARGDRQGI

SEQ ID NO: 132744 - protein, 10 aa, synthetic construct
ASVRGDRQGI

SEQ ID NO: 132745 - protein, 10 aa, synthetic construct
ASPRGDRQGI

SEQ ID NO: 132746 - protein, 10 aa, synthetic construct
ASLRGDRQGI

SEQ ID NO: 132747 - protein, 10 aa, synthetic construct
ASIRGDRQGI

SEQ ID NO: 132748 - protein, 10 aa, synthetic construct
ASMRGDRQGI

SEQ ID NO: 132749 - protein, 10 aa, synthetic construct
ASWRGDRQGI

SEQ ID NO: 132750 - protein, 10 aa, synthetic construct
ASFRGDRQGI

SEQ ID NO: 132751 - protein, 10 aa, synthetic construct
ASKRGDRQGI

SEQ ID NO: 132752 - protein, 10 aa, synthetic construct
ASRRGDRQGI

SEQ ID NO: 132753 - protein, 10 aa, synthetic construct
ASHRGDRQGI

SEQ ID NO: 132754 - protein, 10 aa, synthetic construct
ASSRGDRQGI

SEQ ID NO: 132755 - protein, 10 aa, synthetic construct
ASTRGDRQGI

SEQ ID NO: 132756 - protein, 10 aa, synthetic construct
ASYRGDRQGI

SEQ ID NO: 132757 - protein, 10 aa, synthetic construct
ASNRGDRQGI

SEQ ID NO: 132758 - protein, 10 aa, synthetic construct
ASQRGDRQGI

SEQ ID NO: 132759 - protein, 10 aa, synthetic construct
ASDRGDRQGI

SEQ ID NO: 132760 - protein, 10 aa, synthetic construct
ASERGDRQGI

SEQ ID NO: 132761 - protein, 10 aa, synthetic construct
ATGRGDRQGI

SEQ ID NO: 132762 - protein, 10 aa, synthetic construct
ATARGDRQGI

SEQ ID NO: 132763 - protein, 10 aa, synthetic construct
ATVRGDRQGI

SEQ ID NO: 132764 - protein, 10 aa, synthetic construct
ATPRGDRQGI

SEQ ID NO: 132765 - protein, 10 aa, synthetic construct
ATLRGDRQGI

SEQ ID NO: 132766 - protein, 10 aa, synthetic construct
ATIRGDRQGI

SEQ ID NO: 132767 - protein, 10 aa, synthetic construct
ATMRGDRQGI

SEQ ID NO: 132768 - protein, 10 aa, synthetic construct
ATWRGDRQGI

SEQ ID NO: 132769 - protein, 10 aa, synthetic construct
ATFRGDRQGI

SEQ ID NO: 132770 - protein, 10 aa, synthetic construct
ATKRGDRQGI

SEQ ID NO: 132771 - protein, 10 aa, synthetic construct
ATRRGDRQGI

SEQ ID NO: 132772 - protein, 10 aa, synthetic construct
ATHRGDRQGI

SEQ ID NO: 132773 - protein, 10 aa, synthetic construct
ATSRGDRQGI

SEQ ID NO: 132774 - protein, 10 aa, synthetic construct
ATTRGDRQGI

SEQ ID NO: 132775 - protein, 10 aa, synthetic construct
ATYRGDRQGI

SEQ ID NO: 132776 - protein, 10 aa, synthetic construct
ATNRGDRQGI

SEQ ID NO: 132777 - protein, 10 aa, synthetic construct
ATQRGDRQGI

SEQ ID NO: 132778 - protein, 10 aa, synthetic construct
ATDRGDRQGI

SEQ ID NO: 132779 - protein, 10 aa, synthetic construct
ATERGDRQGI

SEQ ID NO: 132780 - protein, 10 aa, synthetic construct
AYGRGDRQGI

SEQ ID NO: 132781 - protein, 10 aa, synthetic construct
AYARGDRQGI

SEQ ID NO: 132782 - protein, 10 aa, synthetic construct
AYVRGDRQGI

SEQ ID NO: 132783 - protein, 10 aa, synthetic construct
AYPRGDRQGI

SEQ ID NO: 132784 - protein, 10 aa, synthetic construct
AYLRGDRQGI

SEQ ID NO: 132785 - protein, 10 aa, synthetic construct
AYIRGDRQGI

SEQ ID NO: 132786 - protein, 10 aa, synthetic construct
AYMRGDRQGI

SEQ ID NO: 132787 - protein, 10 aa, synthetic construct
AYWRGDRQGI

SEQ ID NO: 132788 - protein, 10 aa, synthetic construct
AYFRGDRQGI

SEQ ID NO: 132789 - protein, 10 aa, synthetic construct
AYKRGDRQGI

SEQ ID NO: 132790 - protein, 10 aa, synthetic construct
AYRRGDRQGI

SEQ ID NO: 132791 - protein, 10 aa, synthetic construct
AYHRGDRQGI

SEQ ID NO: 132792 - protein, 10 aa, synthetic construct
AYSRGDRQGI

SEQ ID NO: 132793 - protein, 10 aa, synthetic construct
AYTRGDRQGI

SEQ ID NO: 132794 - protein, 10 aa, synthetic construct
AYYRGDRQGI

SEQ ID NO: 132795 - protein, 10 aa, synthetic construct
AYNRGDRQGI

SEQ ID NO: 132796 - protein, 10 aa, synthetic construct
AYQRGDRQGI

SEQ ID NO: 132797 - protein, 10 aa, synthetic construct
AYDRGDRQGI

SEQ ID NO: 132798 - protein, 10 aa, synthetic construct
AYERGDRQGI

SEQ ID NO: 132799 - protein, 10 aa, synthetic construct
ANGRGDRQGI

SEQ ID NO: 132800 - protein, 10 aa, synthetic construct
ANARGDRQGI

SEQ ID NO: 132801 - protein, 10 aa, synthetic construct
ANVRGDRQGI

SEQ ID NO: 132802 - protein, 10 aa, synthetic construct
ANPRGDRQGI

SEQ ID NO: 132803 - protein, 10 aa, synthetic construct
ANLRGDRQGI

SEQ ID NO: 132804 - protein, 10 aa, synthetic construct
ANIRGDRQGI

SEQ ID NO: 132805 - protein, 10 aa, synthetic construct
ANMRGDRQGI

SEQ ID NO: 132806 - protein, 10 aa, synthetic construct
ANWRGDRQGI

SEQ ID NO: 132807 - protein, 10 aa, synthetic construct
ANFRGDRQGI

SEQ ID NO: 132808 - protein, 10 aa, synthetic construct
ANKRGDRQGI

SEQ ID NO: 132809 - protein, 10 aa, synthetic construct
ANRRGDRQGI

SEQ ID NO: 132810 - protein, 10 aa, synthetic construct
ANHRGDRQGI

SEQ ID NO: 132811 - protein, 10 aa, synthetic construct
ANSRGDRQGI

SEQ ID NO: 132812 - protein, 10 aa, synthetic construct
ANTRGDRQGI

SEQ ID NO: 132813 - protein, 10 aa, synthetic construct
ANYRGDRQGI

SEQ ID NO: 132814 - protein, 10 aa, synthetic construct
ANNRGDRQGI

SEQ ID NO: 132815 - protein, 10 aa, synthetic construct
ANQRGDRQGI

SEQ ID NO: 132816 - protein, 10 aa, synthetic construct
ANDRGDRQGI

SEQ ID NO: 132817 - protein, 10 aa, synthetic construct
ANERGDRQGI

SEQ ID NO: 132818 - protein, 10 aa, synthetic construct
AQGRGDRQGI

SEQ ID NO: 132819 - protein, 10 aa, synthetic construct
AQARGDRQGI

SEQ ID NO: 132820 - protein, 10 aa, synthetic construct
AQVRGDRQGI

SEQ ID NO: 132821 - protein, 10 aa, synthetic construct
AQPRGDRQGI

SEQ ID NO: 132822 - protein, 10 aa, synthetic construct
AQLRGDRQGI

SEQ ID NO: 132823 - protein, 10 aa, synthetic construct
AQIRGDRQGI

SEQ ID NO: 132824 - protein, 10 aa, synthetic construct
AQMRGDRQGI

SEQ ID NO: 132825 - protein, 10 aa, synthetic construct
AQWRGDRQGI

SEQ ID NO: 132826 - protein, 10 aa, synthetic construct
AQFRGDRQGI

SEQ ID NO: 132827 - protein, 10 aa, synthetic construct
AQKRGDRQGI

SEQ ID NO: 132828 - protein, 10 aa, synthetic construct
AQRRGDRQGI

SEQ ID NO: 132829 - protein, 10 aa, synthetic construct
AQHRGDRQGI

SEQ ID NO: 132830 - protein, 10 aa, synthetic construct
AQSRGDRQGI

SEQ ID NO: 132831 - protein, 10 aa, synthetic construct
AQTRGDRQGI

SEQ ID NO: 132832 - protein, 10 aa, synthetic construct
AQYRGDRQGI

SEQ ID NO: 132833 - protein, 10 aa, synthetic construct
AQNRGDRQGI

SEQ ID NO: 132834 - protein, 10 aa, synthetic construct
AQQRGDRQGI

SEQ ID NO: 132835 - protein, 10 aa, synthetic construct
AQDRGDRQGI

SEQ ID NO: 132836 - protein, 10 aa, synthetic construct
AQERGDRQGI

SEQ ID NO: 132837 - protein, 10 aa, synthetic construct
ADGRGDRQGI

SEQ ID NO: 132838 - protein, 10 aa, synthetic construct
ADARGDRQGI

SEQ ID NO: 132839 - protein, 10 aa, synthetic construct
ADVRGDRQGI

SEQ ID NO: 132840 - protein, 10 aa, synthetic construct
ADPRGDRQGI

SEQ ID NO: 132841 - protein, 10 aa, synthetic construct
ADLRGDRQGI

SEQ ID NO: 132842 - protein, 10 aa, synthetic construct
ADIRGDRQGI

SEQ ID NO: 132843 - protein, 10 aa, synthetic construct
ADMRGDRQGI

SEQ ID NO: 132844 - protein, 10 aa, synthetic construct
ADWRGDRQGI

SEQ ID NO: 132845 - protein, 10 aa, synthetic construct
ADFRGDRQGI

SEQ ID NO: 132846 - protein, 10 aa, synthetic construct
ADKRGDRQGI

SEQ ID NO: 132847 - protein, 10 aa, synthetic construct
ADRRGDRQGI

SEQ ID NO: 132848 - protein, 10 aa, synthetic construct
ADHRGDRQGI

SEQ ID NO: 132849 - protein, 10 aa, synthetic construct
ADSRGDRQGI

SEQ ID NO: 132850 - protein, 10 aa, synthetic construct
ADTRGDRQGI

SEQ ID NO: 132851 - protein, 10 aa, synthetic construct
ADYRGDRQGI

SEQ ID NO: 132852 - protein, 10 aa, synthetic construct
ADNRGDRQGI

SEQ ID NO: 132853 - protein, 10 aa, synthetic construct
ADQRGDRQGI

SEQ ID NO: 132854 - protein, 10 aa, synthetic construct
ADDRGDRQGI

SEQ ID NO: 132855 - protein, 10 aa, synthetic construct
ADERGDRQGI

SEQ ID NO: 132856 - protein, 10 aa, synthetic construct
AEGRGDRQGI

SEQ ID NO: 132857 - protein, 10 aa, synthetic construct
AEARGDRQGI

SEQ ID NO: 132858 - protein, 10 aa, synthetic construct
AEVRGDRQGI

SEQ ID NO: 132859 - protein, 10 aa, synthetic construct
AEPRGDRQGI

SEQ ID NO: 132860 - protein, 10 aa, synthetic construct
AELRGDRQGI

SEQ ID NO: 132861 - protein, 10 aa, synthetic construct
AEIRGDRQGI

SEQ ID NO: 132862 - protein, 10 aa, synthetic construct
AEMRGDRQGI

SEQ ID NO: 132863 - protein, 10 aa, synthetic construct
AEWRGDRQGI

SEQ ID NO: 132864 - protein, 10 aa, synthetic construct
AEFRGDRQGI

SEQ ID NO: 132865 - protein, 10 aa, synthetic construct
AEKRGDRQGI

SEQ ID NO: 132866 - protein, 10 aa, synthetic construct
AERRGDRQGI

SEQ ID NO: 132867 - protein, 10 aa, synthetic construct
AEHRGDRQGI

SEQ ID NO: 132868 - protein, 10 aa, synthetic construct
AESRGDRQGI

SEQ ID NO: 132869 - protein, 10 aa, synthetic construct
AETRGDRQGI

SEQ ID NO: 132870 - protein, 10 aa, synthetic construct
AEYRGDRQGI

SEQ ID NO: 132871 - protein, 10 aa, synthetic construct
AENRGDRQGI

SEQ ID NO: 132872 - protein, 10 aa, synthetic construct
AEQRGDRQGI

SEQ ID NO: 132873 - protein, 10 aa, synthetic construct
AEDRGDRQGI

SEQ ID NO: 132874 - protein, 10 aa, synthetic construct
AEERGDRQGI

SEQ ID NO: 132875 - protein, 10 aa, synthetic construct
EGGRGDRQGI

SEQ ID NO: 132876 - protein, 10 aa, synthetic construct
EGARGDRQGI

SEQ ID NO: 132877 - protein, 10 aa, synthetic construct
EGVRGDRQGI

SEQ ID NO: 132878 - protein, 10 aa, synthetic construct
EGPRGDRQGI

SEQ ID NO: 132879 - protein, 10 aa, synthetic construct
EGLRGDRQGI

SEQ ID NO: 132880 - protein, 10 aa, synthetic construct
EGIRGDRQGI

SEQ ID NO: 132881 - protein, 10 aa, synthetic construct
EGMRGDRQGI

SEQ ID NO: 132882 - protein, 10 aa, synthetic construct
EGWRGDRQGI

SEQ ID NO: 132883 - protein, 10 aa, synthetic construct
EGFRGDRQGI

SEQ ID NO: 132884 - protein, 10 aa, synthetic construct
EGKRGDRQGI

SEQ ID NO: 132885 - protein, 10 aa, synthetic construct
EGRRGDRQGI

SEQ ID NO: 132886 - protein, 10 aa, synthetic construct
EGHRGDRQGI

SEQ ID NO: 132887 - protein, 10 aa, synthetic construct
EGSRGDRQGI

SEQ ID NO: 132888 - protein, 10 aa, synthetic construct
EGTRGDRQGI

SEQ ID NO: 132889 - protein, 10 aa, synthetic construct
EGYRGDRQGI

SEQ ID NO: 132890 - protein, 10 aa, synthetic construct
EGNRGDRQGI

SEQ ID NO: 132891 - protein, 10 aa, synthetic construct
EGQRGDRQGI

SEQ ID NO: 132892 - protein, 10 aa, synthetic construct
EGDRGDRQGI

SEQ ID NO: 132893 - protein, 10 aa, synthetic construct
EGERGDRQGI

SEQ ID NO: 132894 - protein, 10 aa, synthetic construct
EAGRGDRQGI

SEQ ID NO: 132895 - protein, 10 aa, synthetic construct
EAARGDRQGI

SEQ ID NO: 132896 - protein, 10 aa, synthetic construct
EAVRGDRQGI

SEQ ID NO: 132897 - protein, 10 aa, synthetic construct
EAPRGDRQGI

SEQ ID NO: 132898 - protein, 10 aa, synthetic construct
EALRGDRQGI

SEQ ID NO: 132899 - protein, 10 aa, synthetic construct
EAIRGDRQGI

SEQ ID NO: 132900 - protein, 10 aa, synthetic construct
EAMRGDRQGI

SEQ ID NO: 132901 - protein, 10 aa, synthetic construct
EAWRGDRQGI

SEQ ID NO: 132902 - protein, 10 aa, synthetic construct
EAFRGDRQGI

SEQ ID NO: 132903 - protein, 10 aa, synthetic construct
EAKRGDRQGI

SEQ ID NO: 132904 - protein, 10 aa, synthetic construct
EARRGDRQGI

SEQ ID NO: 132905 - protein, 10 aa, synthetic construct
EAHRGDRQGI

SEQ ID NO: 132906 - protein, 10 aa, synthetic construct
EASRGDRQGI

SEQ ID NO: 132907 - protein, 10 aa, synthetic construct
EATRGDRQGI

SEQ ID NO: 132908 - protein, 10 aa, synthetic construct
EAYRGDRQGI

SEQ ID NO: 132909 - protein, 10 aa, synthetic construct
EANRGDRQGI

SEQ ID NO: 132910 - protein, 10 aa, synthetic construct
EAQRGDRQGI

SEQ ID NO: 132911 - protein, 10 aa, synthetic construct
EADRGDRQGI

SEQ ID NO: 132912 - protein, 10 aa, synthetic construct
EAERGDRQGI

SEQ ID NO: 132913 - protein, 10 aa, synthetic construct
EVGRGDRQGI

SEQ ID NO: 132914 - protein, 10 aa, synthetic construct
EVARGDRQGI

SEQ ID NO: 132915 - protein, 10 aa, synthetic construct
EVVRGDRQGI

SEQ ID NO: 132916 - protein, 10 aa, synthetic construct
EVPRGDRQGI

SEQ ID NO: 132917 - protein, 10 aa, synthetic construct
EVLRGDRQGI

SEQ ID NO: 132918 - protein, 10 aa, synthetic construct
EVIRGDRQGI

SEQ ID NO: 132919 - protein, 10 aa, synthetic construct
EVMRGDRQGI

SEQ ID NO: 132920 - protein, 10 aa, synthetic construct
EVWRGDRQGI

SEQ ID NO: 132921 - protein, 10 aa, synthetic construct
EVFRGDRQGI

SEQ ID NO: 132922 - protein, 10 aa, synthetic construct
EVKRGDRQGI

SEQ ID NO: 132923 - protein, 10 aa, synthetic construct
EVRRGDRQGI

SEQ ID NO: 132924 - protein, 10 aa, synthetic construct
EVHRGDRQGI

SEQ ID NO: 132925 - protein, 10 aa, synthetic construct
EVSRGDRQGI

SEQ ID NO: 132926 - protein, 10 aa, synthetic construct
EVTRGDRQGI

SEQ ID NO: 132927 - protein, 10 aa, synthetic construct
EVYRGDRQGI

SEQ ID NO: 132928 - protein, 10 aa, synthetic construct
EVNRGDRQGI

SEQ ID NO: 132929 - protein, 10 aa, synthetic construct
EVQRGDRQGI

SEQ ID NO: 132930 - protein, 10 aa, synthetic construct
EVDRGDRQGI

SEQ ID NO: 132931 - protein, 10 aa, synthetic construct
EVERGDRQGI

SEQ ID NO: 132932 - protein, 10 aa, synthetic construct
EPGRGDRQGI

SEQ ID NO: 132933 - protein, 10 aa, synthetic construct
EPARGDRQGI

SEQ ID NO: 132934 - protein, 10 aa, synthetic construct
EPVRGDRQGI

SEQ ID NO: 132935 - protein, 10 aa, synthetic construct
EPPRGDRQGI

SEQ ID NO: 132936 - protein, 10 aa, synthetic construct
EPLRGDRQGI

SEQ ID NO: 132937 - protein, 10 aa, synthetic construct
EPIRGDRQGI

SEQ ID NO: 132938 - protein, 10 aa, synthetic construct
EPMRGDRQGI

SEQ ID NO: 132939 - protein, 10 aa, synthetic construct
EPWRGDRQGI

SEQ ID NO: 132940 - protein, 10 aa, synthetic construct
EPFRGDRQGI

SEQ ID NO: 132941 - protein, 10 aa, synthetic construct
EPKRGDRQGI

SEQ ID NO: 132942 - protein, 10 aa, synthetic construct
EPRRGDRQGI

SEQ ID NO: 132943 - protein, 10 aa, synthetic construct
EPHRGDRQGI

SEQ ID NO: 132944 - protein, 10 aa, synthetic construct
EPSRGDRQGI

SEQ ID NO: 132945 - protein, 10 aa, synthetic construct
EPTRGDRQGI

SEQ ID NO: 132946 - protein, 10 aa, synthetic construct
EPYRGDRQGI

SEQ ID NO: 132947 - protein, 10 aa, synthetic construct
EPNRGDRQGI

SEQ ID NO: 132948 - protein, 10 aa, synthetic construct
EPQRGDRQGI

SEQ ID NO: 132949 - protein, 10 aa, synthetic construct
EPDRGDRQGI

SEQ ID NO: 132950 - protein, 10 aa, synthetic construct
EPERGDRQGI

SEQ ID NO: 132951 - protein, 10 aa, synthetic construct
ELGRGDRQGI

SEQ ID NO: 132952 - protein, 10 aa, synthetic construct
ELARGDRQGI

SEQ ID NO: 132953 - protein, 10 aa, synthetic construct
ELVRGDRQGI

SEQ ID NO: 132954 - protein, 10 aa, synthetic construct
ELPRGDRQGI

SEQ ID NO: 132955 - protein, 10 aa, synthetic construct
ELLRGDRQGI

SEQ ID NO: 132956 - protein, 10 aa, synthetic construct
ELIRGDRQGI

SEQ ID NO: 132957 - protein, 10 aa, synthetic construct
ELMRGDRQGI

SEQ ID NO: 132958 - protein, 10 aa, synthetic construct
ELWRGDRQGI

SEQ ID NO: 132959 - protein, 10 aa, synthetic construct
ELFRGDRQGI

SEQ ID NO: 132960 - protein, 10 aa, synthetic construct
ELKRGDRQGI

SEQ ID NO: 132961 - protein, 10 aa, synthetic construct
ELRRGDRQGI

SEQ ID NO: 132962 - protein, 10 aa, synthetic construct
ELHRGDRQGI

SEQ ID NO: 132963 - protein, 10 aa, synthetic construct
ELSRGDRQGI

SEQ ID NO: 132964 - protein, 10 aa, synthetic construct
ELTRGDRQGI

SEQ ID NO: 132965 - protein, 10 aa, synthetic construct
ELYRGDRQGI

SEQ ID NO: 132966 - protein, 10 aa, synthetic construct
ELNRGDRQGI

SEQ ID NO: 132967 - protein, 10 aa, synthetic construct
ELQRGDRQGI

SEQ ID NO: 132968 - protein, 10 aa, synthetic construct
ELDRGDRQGI

SEQ ID NO: 132969 - protein, 10 aa, synthetic construct
ELERGDRQGI

SEQ ID NO: 132970 - protein, 10 aa, synthetic construct
EIGRGDRQGI

SEQ ID NO: 132971 - protein, 10 aa, synthetic construct
EIARGDRQGI

SEQ ID NO: 132972 - protein, 10 aa, synthetic construct
EIVRGDRQGI

SEQ ID NO: 132973 - protein, 10 aa, synthetic construct
EIPRGDRQGI

SEQ ID NO: 132974 - protein, 10 aa, synthetic construct
EILRGDRQGI

SEQ ID NO: 132975 - protein, 10 aa, synthetic construct
EIIRGDRQGI

SEQ ID NO: 132976 - protein, 10 aa, synthetic construct
EIMRGDRQGI

SEQ ID NO: 132977 - protein, 10 aa, synthetic construct
EIWRGDRQGI

SEQ ID NO: 132978 - protein, 10 aa, synthetic construct
EIFRGDRQGI

SEQ ID NO: 132979 - protein, 10 aa, synthetic construct
EIKRGDRQGI

SEQ ID NO: 132980 - protein, 10 aa, synthetic construct
EIRRGDRQGI

SEQ ID NO: 132981 - protein, 10 aa, synthetic construct
EIHRGDRQGI

SEQ ID NO: 132982 - protein, 10 aa, synthetic construct
EISRGDRQGI

SEQ ID NO: 132983 - protein, 10 aa, synthetic construct
EITRGDRQGI

SEQ ID NO: 132984 - protein, 10 aa, synthetic construct
EIYRGDRQGI

SEQ ID NO: 132985 - protein, 10 aa, synthetic construct
EINRGDRQGI

SEQ ID NO: 132986 - protein, 10 aa, synthetic construct
EIQRGDRQGI

SEQ ID NO: 132987 - protein, 10 aa, synthetic construct
EIDRGDRQGI

SEQ ID NO: 132988 - protein, 10 aa, synthetic construct
EIERGDRQGI

SEQ ID NO: 132989 - protein, 10 aa, synthetic construct
EMGRGDRQGI

SEQ ID NO: 132990 - protein, 10 aa, synthetic construct
EMARGDRQGI

SEQ ID NO: 132991 - protein, 10 aa, synthetic construct
EMVRGDRQGI

SEQ ID NO: 132992 - protein, 10 aa, synthetic construct
EMPRGDRQGI

SEQ ID NO: 132993 - protein, 10 aa, synthetic construct
EMLRGDRQGI

SEQ ID NO: 132994 - protein, 10 aa, synthetic construct
EMIRGDRQGI

SEQ ID NO: 132995 - protein, 10 aa, synthetic construct
EMMRGDRQGI

SEQ ID NO: 132996 - protein, 10 aa, synthetic construct
EMWRGDRQGI

SEQ ID NO: 132997 - protein, 10 aa, synthetic construct
EMFRGDRQGI

SEQ ID NO: 132998 - protein, 10 aa, synthetic construct
EMKRGDRQGI

SEQ ID NO: 132999 - protein, 10 aa, synthetic construct
EMRRGDRQGI

SEQ ID NO: 133000 - protein, 10 aa, synthetic construct
EMHRGDRQGI

SEQ ID NO: 133001 - protein, 10 aa, synthetic construct
EMSRGDRQGI

SEQ ID NO: 133002 - protein, 10 aa, synthetic construct
EMTRGDRQGI

SEQ ID NO: 133003 - protein, 10 aa, synthetic construct
EMYRGDRQGI

SEQ ID NO: 133004 - protein, 10 aa, synthetic construct
EMNRGDRQGI

SEQ ID NO: 133005 - protein, 10 aa, synthetic construct
EMQRGDRQGI

SEQ ID NO: 133006 - protein, 10 aa, synthetic construct
EMDRGDRQGI

SEQ ID NO: 133007 - protein, 10 aa, synthetic construct
EMERGDRQGI

SEQ ID NO: 133008 - protein, 10 aa, synthetic construct
EWGRGDRQGI

SEQ ID NO: 133009 - protein, 10 aa, synthetic construct
EWARGDRQGI

SEQ ID NO: 133010 - protein, 10 aa, synthetic construct
EWVRGDRQGI

SEQ ID NO: 133011 - protein, 10 aa, synthetic construct
EWPRGDRQGI

SEQ ID NO: 133012 - protein, 10 aa, synthetic construct
EWLRGDRQGI

SEQ ID NO: 133013 - protein, 10 aa, synthetic construct
EWIRGDRQGI

SEQ ID NO: 133014 - protein, 10 aa, synthetic construct
EWMRGDRQGI

SEQ ID NO: 133015 - protein, 10 aa, synthetic construct
EWWRGDRQGI

SEQ ID NO: 133016 - protein, 10 aa, synthetic construct
EWFRGDRQGI

SEQ ID NO: 133017 - protein, 10 aa, synthetic construct
EWKRGDRQGI

SEQ ID NO: 133018 - protein, 10 aa, synthetic construct
EWRRGDRQGI

SEQ ID NO: 133019 - protein, 10 aa, synthetic construct
EWHRGDRQGI

SEQ ID NO: 133020 - protein, 10 aa, synthetic construct
EWSRGDRQGI

SEQ ID NO: 133021 - protein, 10 aa, synthetic construct
EWTRGDRQGI

SEQ ID NO: 133022 - protein, 10 aa, synthetic construct
EWYRGDRQGI

SEQ ID NO: 133023 - protein, 10 aa, synthetic construct
EWNRGDRQGI

SEQ ID NO: 133024 - protein, 10 aa, synthetic construct
EWQRGDRQGI

SEQ ID NO: 133025 - protein, 10 aa, synthetic construct
EWDRGDRQGI

SEQ ID NO: 133026 - protein, 10 aa, synthetic construct
EWERGDRQGI

SEQ ID NO: 133027 - protein, 10 aa, synthetic construct
EFGRGDRQGI

SEQ ID NO: 133028 - protein, 10 aa, synthetic construct
EFARGDRQGI

SEQ ID NO: 133029 - protein, 10 aa, synthetic construct
EFVRGDRQGI

SEQ ID NO: 133030 - protein, 10 aa, synthetic construct
EFPRGDRQGI

SEQ ID NO: 133031 - protein, 10 aa, synthetic construct
EFLRGDRQGI

SEQ ID NO: 133032 - protein, 10 aa, synthetic construct
EFIRGDRQGI

SEQ ID NO: 133033 - protein, 10 aa, synthetic construct
EFMRGDRQGI

SEQ ID NO: 133034 - protein, 10 aa, synthetic construct
EFWRGDRQGI

SEQ ID NO: 133035 - protein, 10 aa, synthetic construct
EFFRGDRQGI

SEQ ID NO: 133036 - protein, 10 aa, synthetic construct
EFKRGDRQGI

SEQ ID NO: 133037 - protein, 10 aa, synthetic construct
EFRRGDRQGI

SEQ ID NO: 133038 - protein, 10 aa, synthetic construct
EFHRGDRQGI

SEQ ID NO: 133039 - protein, 10 aa, synthetic construct
EFSRGDRQGI

SEQ ID NO: 133040 - protein, 10 aa, synthetic construct
EFTRGDRQGI

SEQ ID NO: 133041 - protein, 10 aa, synthetic construct
EFYRGDRQGI

SEQ ID NO: 133042 - protein, 10 aa, synthetic construct
EFNRGDRQGI

SEQ ID NO: 133043 - protein, 10 aa, synthetic construct
EFQRGDRQGI

SEQ ID NO: 133044 - protein, 10 aa, synthetic construct
EFDRGDRQGI

SEQ ID NO: 133045 - protein, 10 aa, synthetic construct
EFERGDRQGI

SEQ ID NO: 133046 - protein, 10 aa, synthetic construct
EKGRGDRQGI

SEQ ID NO: 133047 - protein, 10 aa, synthetic construct
EKARGDRQGI

SEQ ID NO: 133048 - protein, 10 aa, synthetic construct
EKVRGDRQGI

SEQ ID NO: 133049 - protein, 10 aa, synthetic construct
EKPRGDRQGI

SEQ ID NO: 133050 - protein, 10 aa, synthetic construct
EKLRGDRQGI

SEQ ID NO: 133051 - protein, 10 aa, synthetic construct
EKIRGDRQGI

SEQ ID NO: 133052 - protein, 10 aa, synthetic construct
EKMRGDRQGI

SEQ ID NO: 133053 - protein, 10 aa, synthetic construct
EKWRGDRQGI

SEQ ID NO: 133054 - protein, 10 aa, synthetic construct
EKFRGDRQGI

SEQ ID NO: 133055 - protein, 10 aa, synthetic construct
EKKRGDRQGI

SEQ ID NO: 133056 - protein, 10 aa, synthetic construct
EKRRGDRQGI

SEQ ID NO: 133057 - protein, 10 aa, synthetic construct
EKHRGDRQGI

SEQ ID NO: 133058 - protein, 10 aa, synthetic construct
EKSRGDRQGI

SEQ ID NO: 133059 - protein, 10 aa, synthetic construct
EKTRGDRQGI

SEQ ID NO: 133060 - protein, 10 aa, synthetic construct
EKYRGDRQGI

SEQ ID NO: 133061 - protein, 10 aa, synthetic construct
EKNRGDRQGI

SEQ ID NO: 133062 - protein, 10 aa, synthetic construct
EKQRGDRQGI

SEQ ID NO: 133063 - protein, 10 aa, synthetic construct
EKDRGDRQGI

SEQ ID NO: 133064 - protein, 10 aa, synthetic construct
EKERGDRQGI

SEQ ID NO: 133065 - protein, 10 aa, synthetic construct
ERGRGDRQGI

SEQ ID NO: 133066 - protein, 10 aa, synthetic construct
ERARGDRQGI

SEQ ID NO: 133067 - protein, 10 aa, synthetic construct
ERVRGDRQGI

SEQ ID NO: 133068 - protein, 10 aa, synthetic construct
ERPRGDRQGI

SEQ ID NO: 133069 - protein, 10 aa, synthetic construct
ERLRGDRQGI

SEQ ID NO: 133070 - protein, 10 aa, synthetic construct
ERIRGDRQGI

SEQ ID NO: 133071 - protein, 10 aa, synthetic construct
ERMRGDRQGI

SEQ ID NO: 133072 - protein, 10 aa, synthetic construct
ERWRGDRQGI

SEQ ID NO: 133073 - protein, 10 aa, synthetic construct
ERFRGDRQGI

SEQ ID NO: 133074 - protein, 10 aa, synthetic construct
ERKRGDRQGI

SEQ ID NO: 133075 - protein, 10 aa, synthetic construct
ERRRGDRQGI

SEQ ID NO: 133076 - protein, 10 aa, synthetic construct
ERHRGDRQGI

SEQ ID NO: 133077 - protein, 10 aa, synthetic construct
ERSRGDRQGI

SEQ ID NO: 133078 - protein, 10 aa, synthetic construct
ERTRGDRQGI

SEQ ID NO: 133079 - protein, 10 aa, synthetic construct
ERYRGDRQGI

SEQ ID NO: 133080 - protein, 10 aa, synthetic construct
ERNRGDRQGI

SEQ ID NO: 133081 - protein, 10 aa, synthetic construct
ERQRGDRQGI

SEQ ID NO: 133082 - protein, 10 aa, synthetic construct
ERDRGDRQGI

SEQ ID NO: 133083 - protein, 10 aa, synthetic construct
ERERGDRQGI

SEQ ID NO: 133084 - protein, 10 aa, synthetic construct
EHGRGDRQGI

SEQ ID NO: 133085 - protein, 10 aa, synthetic construct
EHARGDRQGI

SEQ ID NO: 133086 - protein, 10 aa, synthetic construct
EHVRGDRQGI

SEQ ID NO: 133087 - protein, 10 aa, synthetic construct
EHPRGDRQGI

SEQ ID NO: 133088 - protein, 10 aa, synthetic construct
EHLRGDRQGI

SEQ ID NO: 133089 - protein, 10 aa, synthetic construct
EHIRGDRQGI

SEQ ID NO: 133090 - protein, 10 aa, synthetic construct
EHMRGDRQGI

SEQ ID NO: 133091 - protein, 10 aa, synthetic construct
EHWRGDRQGI

SEQ ID NO: 133092 - protein, 10 aa, synthetic construct
EHFRGDRQGI

SEQ ID NO: 133093 - protein, 10 aa, synthetic construct
EHKRGDRQGI

SEQ ID NO: 133094 - protein, 10 aa, synthetic construct
EHRRGDRQGI

SEQ ID NO: 133095 - protein, 10 aa, synthetic construct
EHHRGDRQGI

SEQ ID NO: 133096 - protein, 10 aa, synthetic construct
EHSRGDRQGI

SEQ ID NO: 133097 - protein, 10 aa, synthetic construct
EHTRGDRQGI

SEQ ID NO: 133098 - protein, 10 aa, synthetic construct
EHYRGDRQGI

SEQ ID NO: 133099 - protein, 10 aa, synthetic construct
EHNRGDRQGI

SEQ ID NO: 133100 - protein, 10 aa, synthetic construct
EHQRGDRQGI

SEQ ID NO: 133101 - protein, 10 aa, synthetic construct
EHDRGDRQGI

SEQ ID NO: 133102 - protein, 10 aa, synthetic construct
EHERGDRQGI

SEQ ID NO: 133103 - protein, 10 aa, synthetic construct
ESGRGDRQGI

SEQ ID NO: 133104 - protein, 10 aa, synthetic construct
ESARGDRQGI

SEQ ID NO: 133105 - protein, 10 aa, synthetic construct
ESVRGDRQGI

SEQ ID NO: 133106 - protein, 10 aa, synthetic construct
ESPRGDRQGI

SEQ ID NO: 133107 - protein, 10 aa, synthetic construct
ESLRGDRQGI

SEQ ID NO: 133108 - protein, 10 aa, synthetic construct
ESIRGDRQGI

SEQ ID NO: 133109 - protein, 10 aa, synthetic construct
ESMRGDRQGI

SEQ ID NO: 133110 - protein, 10 aa, synthetic construct
ESWRGDRQGI

SEQ ID NO: 133111 - protein, 10 aa, synthetic construct
ESFRGDRQGI

SEQ ID NO: 133112 - protein, 10 aa, synthetic construct
ESKRGDRQGI

SEQ ID NO: 133113 - protein, 10 aa, synthetic construct
ESRRGDRQGI

SEQ ID NO: 133114 - protein, 10 aa, synthetic construct
ESHRGDRQGI

SEQ ID NO: 133115 - protein, 10 aa, synthetic construct
ESSRGDRQGI

SEQ ID NO: 133116 - protein, 10 aa, synthetic construct
ESTRGDRQGI

SEQ ID NO: 133117 - protein, 10 aa, synthetic construct
ESYRGDRQGI

SEQ ID NO: 133118 - protein, 10 aa, synthetic construct
ESNRGDRQGI

SEQ ID NO: 133119 - protein, 10 aa, synthetic construct
ESQRGDRQGI

SEQ ID NO: 133120 - protein, 10 aa, synthetic construct
ESDRGDRQGI

SEQ ID NO: 133121 - protein, 10 aa, synthetic construct
ESERGDRQGI

SEQ ID NO: 133122 - protein, 10 aa, synthetic construct
ETGRGDRQGI

SEQ ID NO: 133123 - protein, 10 aa, synthetic construct
ETARGDRQGI

SEQ ID NO: 133124 - protein, 10 aa, synthetic construct
ETVRGDRQGI

SEQ ID NO: 133125 - protein, 10 aa, synthetic construct
ETPRGDRQGI

SEQ ID NO: 133126 - protein, 10 aa, synthetic construct
ETLRGDRQGI

SEQ ID NO: 133127 - protein, 10 aa, synthetic construct
ETIRGDRQGI

SEQ ID NO: 133128 - protein, 10 aa, synthetic construct
ETMRGDRQGI

SEQ ID NO: 133129 - protein, 10 aa, synthetic construct
ETWRGDRQGI

SEQ ID NO: 133130 - protein, 10 aa, synthetic construct
ETFRGDRQGI

SEQ ID NO: 133131 - protein, 10 aa, synthetic construct
ETKRGDRQGI

SEQ ID NO: 133132 - protein, 10 aa, synthetic construct
ETRRGDRQGI

SEQ ID NO: 133133 - protein, 10 aa, synthetic construct
ETHRGDRQGI

SEQ ID NO: 133134 - protein, 10 aa, synthetic construct
ETSRGDRQGI

SEQ ID NO: 133135 - protein, 10 aa, synthetic construct
ETTRGDRQGI

SEQ ID NO: 133136 - protein, 10 aa, synthetic construct
ETYRGDRQGI

SEQ ID NO: 133137 - protein, 10 aa, synthetic construct
ETNRGDRQGI

SEQ ID NO: 133138 - protein, 10 aa, synthetic construct
ETQRGDRQGI

SEQ ID NO: 133139 - protein, 10 aa, synthetic construct
ETDRGDRQGI

SEQ ID NO: 133140 - protein, 10 aa, synthetic construct
ETERGDRQGI

SEQ ID NO: 133141 - protein, 10 aa, synthetic construct
EYGRGDRQGI

SEQ ID NO: 133142 - protein, 10 aa, synthetic construct
EYARGDRQGI

SEQ ID NO: 133143 - protein, 10 aa, synthetic construct
EYVRGDRQGI

SEQ ID NO: 133144 - protein, 10 aa, synthetic construct
EYPRGDRQGI

SEQ ID NO: 133145 - protein, 10 aa, synthetic construct
EYLRGDRQGI

SEQ ID NO: 133146 - protein, 10 aa, synthetic construct
EYIRGDRQGI

SEQ ID NO: 133147 - protein, 10 aa, synthetic construct
EYMRGDRQGI

SEQ ID NO: 133148 - protein, 10 aa, synthetic construct
EYWRGDRQGI

SEQ ID NO: 133149 - protein, 10 aa, synthetic construct
EYFRGDRQGI

SEQ ID NO: 133150 - protein, 10 aa, synthetic construct
EYKRGDRQGI

SEQ ID NO: 133151 - protein, 10 aa, synthetic construct
EYRRGDRQGI

SEQ ID NO: 133152 - protein, 10 aa, synthetic construct
EYHRGDRQGI

SEQ ID NO: 133153 - protein, 10 aa, synthetic construct
EYSRGDRQGI

SEQ ID NO: 133154 - protein, 10 aa, synthetic construct
EYTRGDRQGI

SEQ ID NO: 133155 - protein, 10 aa, synthetic construct
EYYRGDRQGI

SEQ ID NO: 133156 - protein, 10 aa, synthetic construct
EYNRGDRQGI

SEQ ID NO: 133157 - protein, 10 aa, synthetic construct
EYQRGDRQGI

SEQ ID NO: 133158 - protein, 10 aa, synthetic construct
EYDRGDRQGI

SEQ ID NO: 133159 - protein, 10 aa, synthetic construct
EYERGDRQGI

SEQ ID NO: 133160 - protein, 10 aa, synthetic construct
ENGRGDRQGI

SEQ ID NO: 133161 - protein, 10 aa, synthetic construct
ENARGDRQGI

SEQ ID NO: 133162 - protein, 10 aa, synthetic construct
ENVRGDRQGI

SEQ ID NO: 133163 - protein, 10 aa, synthetic construct
ENPRGDRQGI

SEQ ID NO: 133164 - protein, 10 aa, synthetic construct
ENLRGDRQGI

SEQ ID NO: 133165 - protein, 10 aa, synthetic construct
ENIRGDRQGI

SEQ ID NO: 133166 - protein, 10 aa, synthetic construct
ENMRGDRQGI

SEQ ID NO: 133167 - protein, 10 aa, synthetic construct
ENWRGDRQGI

SEQ ID NO: 133168 - protein, 10 aa, synthetic construct
ENFRGDRQGI

SEQ ID NO: 133169 - protein, 10 aa, synthetic construct
ENKRGDRQGI

SEQ ID NO: 133170 - protein, 10 aa, synthetic construct
ENRRGDRQGI

SEQ ID NO: 133171 - protein, 10 aa, synthetic construct
ENHRGDRQGI

SEQ ID NO: 133172 - protein, 10 aa, synthetic construct
ENSRGDRQGI

SEQ ID NO: 133173 - protein, 10 aa, synthetic construct
ENTRGDRQGI

SEQ ID NO: 133174 - protein, 10 aa, synthetic construct
ENYRGDRQGI

SEQ ID NO: 133175 - protein, 10 aa, synthetic construct
ENNRGDRQGI

SEQ ID NO: 133176 - protein, 10 aa, synthetic construct
ENQRGDRQGI

SEQ ID NO: 133177 - protein, 10 aa, synthetic construct
ENDRGDRQGI

SEQ ID NO: 133178 - protein, 10 aa, synthetic construct
ENERGDRQGI

SEQ ID NO: 133179 - protein, 10 aa, synthetic construct
EQGRGDRQGI

SEQ ID NO: 133180 - protein, 10 aa, synthetic construct
EQARGDRQGI

SEQ ID NO: 133181 - protein, 10 aa, synthetic construct
EQVRGDRQGI

SEQ ID NO: 133182 - protein, 10 aa, synthetic construct
EQPRGDRQGI

SEQ ID NO: 133183 - protein, 10 aa, synthetic construct
EQLRGDRQGI

SEQ ID NO: 133184 - protein, 10 aa, synthetic construct
EQIRGDRQGI

SEQ ID NO: 133185 - protein, 10 aa, synthetic construct
EQMRGDRQGI

SEQ ID NO: 133186 - protein, 10 aa, synthetic construct
EQWRGDRQGI

SEQ ID NO: 133187 - protein, 10 aa, synthetic construct
EQFRGDRQGI

SEQ ID NO: 133188 - protein, 10 aa, synthetic construct
EQKRGDRQGI

SEQ ID NO: 133189 - protein, 10 aa, synthetic construct
EQRRGDRQGI

SEQ ID NO: 133190 - protein, 10 aa, synthetic construct
EQHRGDRQGI

SEQ ID NO: 133191 - protein, 10 aa, synthetic construct
EQSRGDRQGI

SEQ ID NO: 133192 - protein, 10 aa, synthetic construct
EQTRGDRQGI

SEQ ID NO: 133193 - protein, 10 aa, synthetic construct
EQYRGDRQGI

SEQ ID NO: 133194 - protein, 10 aa, synthetic construct
EQNRGDRQGI

SEQ ID NO: 133195 - protein, 10 aa, synthetic construct
EQQRGDRQGI

SEQ ID NO: 133196 - protein, 10 aa, synthetic construct
EQDRGDRQGI

SEQ ID NO: 133197 - protein, 10 aa, synthetic construct
EQERGDRQGI

SEQ ID NO: 133198 - protein, 10 aa, synthetic construct
EDGRGDRQGI

SEQ ID NO: 133199 - protein, 10 aa, synthetic construct
EDARGDRQGI

SEQ ID NO: 133200 - protein, 10 aa, synthetic construct
EDVRGDRQGI

SEQ ID NO: 133201 - protein, 10 aa, synthetic construct
EDPRGDRQGI

SEQ ID NO: 133202 - protein, 10 aa, synthetic construct
EDLRGDRQGI

SEQ ID NO: 133203 - protein, 10 aa, synthetic construct
EDIRGDRQGI

SEQ ID NO: 133204 - protein, 10 aa, synthetic construct
EDMRGDRQGI

SEQ ID NO: 133205 - protein, 10 aa, synthetic construct
EDWRGDRQGI

SEQ ID NO: 133206 - protein, 10 aa, synthetic construct
EDFRGDRQGI

SEQ ID NO: 133207 - protein, 10 aa, synthetic construct
EDKRGDRQGI

SEQ ID NO: 133208 - protein, 10 aa, synthetic construct
EDRRGDRQGI

SEQ ID NO: 133209 - protein, 10 aa, synthetic construct
EDHRGDRQGI

SEQ ID NO: 133210 - protein, 10 aa, synthetic construct
EDSRGDRQGI

SEQ ID NO: 133211 - protein, 10 aa, synthetic construct
EDTRGDRQGI

SEQ ID NO: 133212 - protein, 10 aa, synthetic construct
EDYRGDRQGI

SEQ ID NO: 133213 - protein, 10 aa, synthetic construct
EDNRGDRQGI

SEQ ID NO: 133214 - protein, 10 aa, synthetic construct
EDQRGDRQGI

SEQ ID NO: 133215 - protein, 10 aa, synthetic construct
EDDRGDRQGI

SEQ ID NO: 133216 - protein, 10 aa, synthetic construct
EDERGDRQGI

SEQ ID NO: 133217 - protein, 10 aa, synthetic construct
EEGRGDRQGI

SEQ ID NO: 133218 - protein, 10 aa, synthetic construct
EEARGDRQGI

SEQ ID NO: 133219 - protein, 10 aa, synthetic construct
EEVRGDRQGI

SEQ ID NO: 133220 - protein, 10 aa, synthetic construct
EEPRGDRQGI

SEQ ID NO: 133221 - protein, 10 aa, synthetic construct
EELRGDRQGI

SEQ ID NO: 133222 - protein, 10 aa, synthetic construct
EEIRGDRQGI

SEQ ID NO: 133223 - protein, 10 aa, synthetic construct
EEMRGDRQGI

SEQ ID NO: 133224 - protein, 10 aa, synthetic construct
EEWRGDRQGI

SEQ ID NO: 133225 - protein, 10 aa, synthetic construct
EEFRGDRQGI

SEQ ID NO: 133226 - protein, 10 aa, synthetic construct
EEKRGDRQGI

SEQ ID NO: 133227 - protein, 10 aa, synthetic construct
EERRGDRQGI

SEQ ID NO: 133228 - protein, 10 aa, synthetic construct
EEHRGDRQGI

SEQ ID NO: 133229 - protein, 10 aa, synthetic construct
EESRGDRQGI

SEQ ID NO: 133230 - protein, 10 aa, synthetic construct
EETRGDRQGI

SEQ ID NO: 133231 - protein, 10 aa, synthetic construct
EEYRGDRQGI

SEQ ID NO: 133232 - protein, 10 aa, synthetic construct
EENRGDRQGI

SEQ ID NO: 133233 - protein, 10 aa, synthetic construct
EEQRGDRQGI

SEQ ID NO: 133234 - protein, 10 aa, synthetic construct
EEDRGDRQGI

SEQ ID NO: 133235 - protein, 10 aa, synthetic construct
EEERGDRQGI

SEQ ID NO: 133236 - protein, 10 aa, synthetic construct
NGGRGDRQGI

SEQ ID NO: 133237 - protein, 10 aa, synthetic construct
NGARGDRQGI

SEQ ID NO: 133238 - protein, 10 aa, synthetic construct
NGVRGDRQGI

SEQ ID NO: 133239 - protein, 10 aa, synthetic construct
NGPRGDRQGI

SEQ ID NO: 133240 - protein, 10 aa, synthetic construct
NGLRGDRQGI

SEQ ID NO: 133241 - protein, 10 aa, synthetic construct
NGIRGDRQGI

SEQ ID NO: 133242 - protein, 10 aa, synthetic construct
NGMRGDRQGI

SEQ ID NO: 133243 - protein, 10 aa, synthetic construct
NGWRGDRQGI

SEQ ID NO: 133244 - protein, 10 aa, synthetic construct
NGFRGDRQGI

SEQ ID NO: 133245 - protein, 10 aa, synthetic construct
NGKRGDRQGI

SEQ ID NO: 133246 - protein, 10 aa, synthetic construct
NGRRGDRQGI

SEQ ID NO: 133247 - protein, 10 aa, synthetic construct
NGHRGDRQGI

SEQ ID NO: 133248 - protein, 10 aa, synthetic construct
NGSRGDRQGI

SEQ ID NO: 133249 - protein, 10 aa, synthetic construct
NGTRGDRQGI

SEQ ID NO: 133250 - protein, 10 aa, synthetic construct
NGYRGDRQGI

SEQ ID NO: 133251 - protein, 10 aa, synthetic construct
NGNRGDRQGI

SEQ ID NO: 133252 - protein, 10 aa, synthetic construct
NGQRGDRQGI

SEQ ID NO: 133253 - protein, 10 aa, synthetic construct
NGDRGDRQGI

SEQ ID NO: 133254 - protein, 10 aa, synthetic construct
NGERGDRQGI

SEQ ID NO: 133255 - protein, 10 aa, synthetic construct
NAGRGDRQGI

SEQ ID NO: 133256 - protein, 10 aa, synthetic construct
NAARGDRQGI

SEQ ID NO: 133257 - protein, 10 aa, synthetic construct
NAVRGDRQGI

SEQ ID NO: 133258 - protein, 10 aa, synthetic construct
NAPRGDRQGI

SEQ ID NO: 133259 - protein, 10 aa, synthetic construct
NALRGDRQGI

SEQ ID NO: 133260 - protein, 10 aa, synthetic construct
NAIRGDRQGI

SEQ ID NO: 133261 - protein, 10 aa, synthetic construct
NAMRGDRQGI

SEQ ID NO: 133262 - protein, 10 aa, synthetic construct
NAWRGDRQGI

SEQ ID NO: 133263 - protein, 10 aa, synthetic construct
NAFRGDRQGI

SEQ ID NO: 133264 - protein, 10 aa, synthetic construct
NAKRGDRQGI

SEQ ID NO: 133265 - protein, 10 aa, synthetic construct
NARRGDRQGI

SEQ ID NO: 133266 - protein, 10 aa, synthetic construct
NAHRGDRQGI

SEQ ID NO: 133267 - protein, 10 aa, synthetic construct
NASRGDRQGI

SEQ ID NO: 133268 - protein, 10 aa, synthetic construct
NATRGDRQGI

SEQ ID NO: 133269 - protein, 10 aa, synthetic construct
NAYRGDRQGI

SEQ ID NO: 133270 - protein, 10 aa, synthetic construct
NANRGDRQGI

SEQ ID NO: 133271 - protein, 10 aa, synthetic construct
NAQRGDRQGI

SEQ ID NO: 133272 - protein, 10 aa, synthetic construct
NADRGDRQGI

SEQ ID NO: 133273 - protein, 10 aa, synthetic construct
NAERGDRQGI

SEQ ID NO: 133274 - protein, 10 aa, synthetic construct
NVGRGDRQGI

SEQ ID NO: 133275 - protein, 10 aa, synthetic construct
NVARGDRQGI

SEQ ID NO: 133276 - protein, 10 aa, synthetic construct
NVVRGDRQGI

SEQ ID NO: 133277 - protein, 10 aa, synthetic construct
NVPRGDRQGI

SEQ ID NO: 133278 - protein, 10 aa, synthetic construct
NVLRGDRQGI

SEQ ID NO: 133279 - protein, 10 aa, synthetic construct
NVIRGDRQGI

SEQ ID NO: 133280 - protein, 10 aa, synthetic construct
NVMRGDRQGI

SEQ ID NO: 133281 - protein, 10 aa, synthetic construct
NVWRGDRQGI

SEQ ID NO: 133282 - protein, 10 aa, synthetic construct
NVFRGDRQGI

SEQ ID NO: 133283 - protein, 10 aa, synthetic construct
NVKRGDRQGI

SEQ ID NO: 133284 - protein, 10 aa, synthetic construct
NVRRGDRQGI

SEQ ID NO: 133285 - protein, 10 aa, synthetic construct
NVHRGDRQGI

SEQ ID NO: 133286 - protein, 10 aa, synthetic construct
NVSRGDRQGI

SEQ ID NO: 133287 - protein, 10 aa, synthetic construct
NVTRGDRQGI

SEQ ID NO: 133288 - protein, 10 aa, synthetic construct
NVYRGDRQGI

SEQ ID NO: 133289 - protein, 10 aa, synthetic construct
NVNRGDRQGI

SEQ ID NO: 133290 - protein, 10 aa, synthetic construct
NVQRGDRQGI

SEQ ID NO: 133291 - protein, 10 aa, synthetic construct
NVDRGDRQGI

SEQ ID NO: 133292 - protein, 10 aa, synthetic construct
NVERGDRQGI

SEQ ID NO: 133293 - protein, 10 aa, synthetic construct
NPGRGDRQGI

SEQ ID NO: 133294 - protein, 10 aa, synthetic construct
NPARGDRQGI

SEQ ID NO: 133295 - protein, 10 aa, synthetic construct
NPVRGDRQGI

SEQ ID NO: 133296 - protein, 10 aa, synthetic construct
NPPRGDRQGI

SEQ ID NO: 133297 - protein, 10 aa, synthetic construct
NPLRGDRQGI

SEQ ID NO: 133298 - protein, 10 aa, synthetic construct
NPIRGDRQGI

SEQ ID NO: 133299 - protein, 10 aa, synthetic construct
NPMRGDRQGI

SEQ ID NO: 133300 - protein, 10 aa, synthetic construct
NPWRGDRQGI

SEQ ID NO: 133301 - protein, 10 aa, synthetic construct
NPFRGDRQGI

SEQ ID NO: 133302 - protein, 10 aa, synthetic construct
NPKRGDRQGI

SEQ ID NO: 133303 - protein, 10 aa, synthetic construct
NPRRGDRQGI

SEQ ID NO: 133304 - protein, 10 aa, synthetic construct
NPHRGDRQGI

SEQ ID NO: 133305 - protein, 10 aa, synthetic construct
NPSRGDRQGI

SEQ ID NO: 133306 - protein, 10 aa, synthetic construct
NPTRGDRQGI

SEQ ID NO: 133307 - protein, 10 aa, synthetic construct
NPYRGDRQGI

SEQ ID NO: 133308 - protein, 10 aa, synthetic construct
NPNRGDRQGI

SEQ ID NO: 133309 - protein, 10 aa, synthetic construct
NPQRGDRQGI

SEQ ID NO: 133310 - protein, 10 aa, synthetic construct
NPDRGDRQGI

SEQ ID NO: 133311 - protein, 10 aa, synthetic construct
NPERGDRQGI

SEQ ID NO: 133312 - protein, 10 aa, synthetic construct
NLGRGDRQGI

SEQ ID NO: 133313 - protein, 10 aa, synthetic construct
NLARGDRQGI

SEQ ID NO: 133314 - protein, 10 aa, synthetic construct
NLVRGDRQGI

SEQ ID NO: 133315 - protein, 10 aa, synthetic construct
NLPRGDRQGI

SEQ ID NO: 133316 - protein, 10 aa, synthetic construct
NLLRGDRQGI

SEQ ID NO: 133317 - protein, 10 aa, synthetic construct
NLIRGDRQGI

SEQ ID NO: 133318 - protein, 10 aa, synthetic construct
NLMRGDRQGI

SEQ ID NO: 133319 - protein, 10 aa, synthetic construct
NLWRGDRQGI

SEQ ID NO: 133320 - protein, 10 aa, synthetic construct
NLFRGDRQGI

SEQ ID NO: 133321 - protein, 10 aa, synthetic construct
NLKRGDRQGI

SEQ ID NO: 133322 - protein, 10 aa, synthetic construct
NLRRGDRQGI

SEQ ID NO: 133323 - protein, 10 aa, synthetic construct
NLHRGDRQGI

SEQ ID NO: 133324 - protein, 10 aa, synthetic construct
NLSRGDRQGI

SEQ ID NO: 133325 - protein, 10 aa, synthetic construct
NLTRGDRQGI

SEQ ID NO: 133326 - protein, 10 aa, synthetic construct
NLYRGDRQGI

SEQ ID NO: 133327 - protein, 10 aa, synthetic construct
NLNRGDRQGI

SEQ ID NO: 133328 - protein, 10 aa, synthetic construct
NLQRGDRQGI

SEQ ID NO: 133329 - protein, 10 aa, synthetic construct
NLDRGDRQGI

SEQ ID NO: 133330 - protein, 10 aa, synthetic construct
NLERGDRQGI

SEQ ID NO: 133331 - protein, 10 aa, synthetic construct
NIGRGDRQGI

SEQ ID NO: 133332 - protein, 10 aa, synthetic construct
NIARGDRQGI

SEQ ID NO: 133333 - protein, 10 aa, synthetic construct
NIVRGDRQGI

SEQ ID NO: 133334 - protein, 10 aa, synthetic construct
NIPRGDRQGI

SEQ ID NO: 133335 - protein, 10 aa, synthetic construct
NILRGDRQGI

SEQ ID NO: 133336 - protein, 10 aa, synthetic construct
NIIRGDRQGI

SEQ ID NO: 133337 - protein, 10 aa, synthetic construct
NIMRGDRQGI

SEQ ID NO: 133338 - protein, 10 aa, synthetic construct
NIWRGDRQGI

SEQ ID NO: 133339 - protein, 10 aa, synthetic construct
NIFRGDRQGI

SEQ ID NO: 133340 - protein, 10 aa, synthetic construct
NIKRGDRQGI

SEQ ID NO: 133341 - protein, 10 aa, synthetic construct
NIRRGDRQGI

SEQ ID NO: 133342 - protein, 10 aa, synthetic construct
NIHRGDRQGI

SEQ ID NO: 133343 - protein, 10 aa, synthetic construct
NISRGDRQGI

SEQ ID NO: 133344 - protein, 10 aa, synthetic construct
NITRGDRQGI

SEQ ID NO: 133345 - protein, 10 aa, synthetic construct
NIYRGDRQGI

SEQ ID NO: 133346 - protein, 10 aa, synthetic construct
NINRGDRQGI

SEQ ID NO: 133347 - protein, 10 aa, synthetic construct
NIQRGDRQGI

SEQ ID NO: 133348 - protein, 10 aa, synthetic construct
NIDRGDRQGI

SEQ ID NO: 133349 - protein, 10 aa, synthetic construct
NIERGDRQGI

SEQ ID NO: 133350 - protein, 10 aa, synthetic construct
NMGRGDRQGI

SEQ ID NO: 133351 - protein, 10 aa, synthetic construct
NMARGDRQGI

SEQ ID NO: 133352 - protein, 10 aa, synthetic construct
NMVRGDRQGI

SEQ ID NO: 133353 - protein, 10 aa, synthetic construct
NMPRGDRQGI

SEQ ID NO: 133354 - protein, 10 aa, synthetic construct
NMLRGDRQGI

SEQ ID NO: 133355 - protein, 10 aa, synthetic construct
NMIRGDRQGI

SEQ ID NO: 133356 - protein, 10 aa, synthetic construct
NMMRGDRQGI

SEQ ID NO: 133357 - protein, 10 aa, synthetic construct
NMWRGDRQGI

SEQ ID NO: 133358 - protein, 10 aa, synthetic construct
NMFRGDRQGI

SEQ ID NO: 133359 - protein, 10 aa, synthetic construct
NMKRGDRQGI

SEQ ID NO: 133360 - protein, 10 aa, synthetic construct
NMRRGDRQGI

SEQ ID NO: 133361 - protein, 10 aa, synthetic construct
NMHRGDRQGI

SEQ ID NO: 133362 - protein, 10 aa, synthetic construct
NMSRGDRQGI

SEQ ID NO: 133363 - protein, 10 aa, synthetic construct
NMTRGDRQGI

SEQ ID NO: 133364 - protein, 10 aa, synthetic construct
NMYRGDRQGI

SEQ ID NO: 133365 - protein, 10 aa, synthetic construct
NMNRGDRQGI

SEQ ID NO: 133366 - protein, 10 aa, synthetic construct
NMQRGDRQGI

SEQ ID NO: 133367 - protein, 10 aa, synthetic construct
NMDRGDRQGI

SEQ ID NO: 133368 - protein, 10 aa, synthetic construct
NMERGDRQGI

SEQ ID NO: 133369 - protein, 10 aa, synthetic construct
NWGRGDRQGI

SEQ ID NO: 133370 - protein, 10 aa, synthetic construct
NWARGDRQGI

SEQ ID NO: 133371 - protein, 10 aa, synthetic construct
NWVRGDRQGI

SEQ ID NO: 133372 - protein, 10 aa, synthetic construct
NWPRGDRQGI

SEQ ID NO: 133373 - protein, 10 aa, synthetic construct
NWLRGDRQGI

SEQ ID NO: 133374 - protein, 10 aa, synthetic construct
NWIRGDRQGI

SEQ ID NO: 133375 - protein, 10 aa, synthetic construct
NWMRGDRQGI

SEQ ID NO: 133376 - protein, 10 aa, synthetic construct
NWWRGDRQGI

SEQ ID NO: 133377 - protein, 10 aa, synthetic construct
NWFRGDRQGI

SEQ ID NO: 133378 - protein, 10 aa, synthetic construct
NWKRGDRQGI

SEQ ID NO: 133379 - protein, 10 aa, synthetic construct
NWRRGDRQGI

SEQ ID NO: 133380 - protein, 10 aa, synthetic construct
NWHRGDRQGI

SEQ ID NO: 133381 - protein, 10 aa, synthetic construct
NWSRGDRQGI

SEQ ID NO: 133382 - protein, 10 aa, synthetic construct
NWTRGDRQGI

SEQ ID NO: 133383 - protein, 10 aa, synthetic construct
NWYRGDRQGI

SEQ ID NO: 133384 - protein, 10 aa, synthetic construct
NWNRGDRQGI

SEQ ID NO: 133385 - protein, 10 aa, synthetic construct
NWQRGDRQGI

SEQ ID NO: 133386 - protein, 10 aa, synthetic construct
NWDRGDRQGI

SEQ ID NO: 133387 - protein, 10 aa, synthetic construct
NWERGDRQGI

SEQ ID NO: 133388 - protein, 10 aa, synthetic construct
NFGRGDRQGI

SEQ ID NO: 133389 - protein, 10 aa, synthetic construct
NFARGDRQGI

SEQ ID NO: 133390 - protein, 10 aa, synthetic construct
NFVRGDRQGI

SEQ ID NO: 133391 - protein, 10 aa, synthetic construct
NFPRGDRQGI

SEQ ID NO: 133392 - protein, 10 aa, synthetic construct
NFLRGDRQGI

SEQ ID NO: 133393 - protein, 10 aa, synthetic construct
NFIRGDRQGI

SEQ ID NO: 133394 - protein, 10 aa, synthetic construct
NFMRGDRQGI

SEQ ID NO: 133395 - protein, 10 aa, synthetic construct
NFWRGDRQGI

SEQ ID NO: 133396 - protein, 10 aa, synthetic construct
NFFRGDRQGI

SEQ ID NO: 133397 - protein, 10 aa, synthetic construct
NFKRGDRQGI

SEQ ID NO: 133398 - protein, 10 aa, synthetic construct
NFRRGDRQGI

SEQ ID NO: 133399 - protein, 10 aa, synthetic construct
NFHRGDRQGI

SEQ ID NO: 133400 - protein, 10 aa, synthetic construct
NFSRGDRQGI

SEQ ID NO: 133401 - protein, 10 aa, synthetic construct
NFTRGDRQGI

SEQ ID NO: 133402 - protein, 10 aa, synthetic construct
NFYRGDRQGI

SEQ ID NO: 133403 - protein, 10 aa, synthetic construct
NFNRGDRQGI

SEQ ID NO: 133404 - protein, 10 aa, synthetic construct
NFQRGDRQGI

SEQ ID NO: 133405 - protein, 10 aa, synthetic construct
NFDRGDRQGI

SEQ ID NO: 133406 - protein, 10 aa, synthetic construct
NFERGDRQGI

SEQ ID NO: 133407 - protein, 10 aa, synthetic construct
NKGRGDRQGI

SEQ ID NO: 133408 - protein, 10 aa, synthetic construct
NKARGDRQGI

SEQ ID NO: 133409 - protein, 10 aa, synthetic construct
NKVRGDRQGI

SEQ ID NO: 133410 - protein, 10 aa, synthetic construct
NKPRGDRQGI

SEQ ID NO: 133411 - protein, 10 aa, synthetic construct
NKLRGDRQGI

SEQ ID NO: 133412 - protein, 10 aa, synthetic construct
NKIRGDRQGI

SEQ ID NO: 133413 - protein, 10 aa, synthetic construct
NKMRGDRQGI

SEQ ID NO: 133414 - protein, 10 aa, synthetic construct
NKWRGDRQGI

SEQ ID NO: 133415 - protein, 10 aa, synthetic construct
NKFRGDRQGI

SEQ ID NO: 133416 - protein, 10 aa, synthetic construct
NKKRGDRQGI

SEQ ID NO: 133417 - protein, 10 aa, synthetic construct
NKRRGDRQGI

SEQ ID NO: 133418 - protein, 10 aa, synthetic construct
NKHRGDRQGI

SEQ ID NO: 133419 - protein, 10 aa, synthetic construct
NKSRGDRQGI

SEQ ID NO: 133420 - protein, 10 aa, synthetic construct
NKTRGDRQGI

SEQ ID NO: 133421 - protein, 10 aa, synthetic construct
NKYRGDRQGI

SEQ ID NO: 133422 - protein, 10 aa, synthetic construct
NKNRGDRQGI

SEQ ID NO: 133423 - protein, 10 aa, synthetic construct
NKQRGDRQGI

SEQ ID NO: 133424 - protein, 10 aa, synthetic construct
NKDRGDRQGI

SEQ ID NO: 133425 - protein, 10 aa, synthetic construct
NKERGDRQGI

SEQ ID NO: 133426 - protein, 10 aa, synthetic construct
NRGRGDRQGI

SEQ ID NO: 133427 - protein, 10 aa, synthetic construct
NRARGDRQGI

SEQ ID NO: 133428 - protein, 10 aa, synthetic construct
NRVRGDRQGI

SEQ ID NO: 133429 - protein, 10 aa, synthetic construct
NRPRGDRQGI

SEQ ID NO: 133430 - protein, 10 aa, synthetic construct
NRLRGDRQGI

SEQ ID NO: 133431 - protein, 10 aa, synthetic construct
NRIRGDRQGI

SEQ ID NO: 133432 - protein, 10 aa, synthetic construct
NRMRGDRQGI

SEQ ID NO: 133433 - protein, 10 aa, synthetic construct
NRWRGDRQGI

SEQ ID NO: 133434 - protein, 10 aa, synthetic construct
NRFRGDRQGI

SEQ ID NO: 133435 - protein, 10 aa, synthetic construct
NRKRGDRQGI

SEQ ID NO: 133436 - protein, 10 aa, synthetic construct
NRRRGDRQGI

SEQ ID NO: 133437 - protein, 10 aa, synthetic construct
NRHRGDRQGI

SEQ ID NO: 133438 - protein, 10 aa, synthetic construct
NRSRGDRQGI

SEQ ID NO: 133439 - protein, 10 aa, synthetic construct
NRTRGDRQGI

SEQ ID NO: 133440 - protein, 10 aa, synthetic construct
NRYRGDRQGI

SEQ ID NO: 133441 - protein, 10 aa, synthetic construct
NRNRGDRQGI

SEQ ID NO: 133442 - protein, 10 aa, synthetic construct
NRQRGDRQGI

SEQ ID NO: 133443 - protein, 10 aa, synthetic construct
NRDRGDRQGI

SEQ ID NO: 133444 - protein, 10 aa, synthetic construct
NRERGDRQGI

SEQ ID NO: 133445 - protein, 10 aa, synthetic construct
NHGRGDRQGI

SEQ ID NO: 133446 - protein, 10 aa, synthetic construct
NHARGDRQGI

SEQ ID NO: 133447 - protein, 10 aa, synthetic construct
NHVRGDRQGI

SEQ ID NO: 133448 - protein, 10 aa, synthetic construct
NHPRGDRQGI

SEQ ID NO: 133449 - protein, 10 aa, synthetic construct
NHLRGDRQGI

SEQ ID NO: 133450 - protein, 10 aa, synthetic construct
NHIRGDRQGI

SEQ ID NO: 133451 - protein, 10 aa, synthetic construct
NHMRGDRQGI

SEQ ID NO: 133452 - protein, 10 aa, synthetic construct
NHWRGDRQGI

SEQ ID NO: 133453 - protein, 10 aa, synthetic construct
NHFRGDRQGI

SEQ ID NO: 133454 - protein, 10 aa, synthetic construct
NHKRGDRQGI

SEQ ID NO: 133455 - protein, 10 aa, synthetic construct
NHRRGDRQGI

SEQ ID NO: 133456 - protein, 10 aa, synthetic construct
NHHRGDRQGI

SEQ ID NO: 133457 - protein, 10 aa, synthetic construct
NHSRGDRQGI

SEQ ID NO: 133458 - protein, 10 aa, synthetic construct
NHTRGDRQGI

SEQ ID NO: 133459 - protein, 10 aa, synthetic construct
NHYRGDRQGI

SEQ ID NO: 133460 - protein, 10 aa, synthetic construct
NHNRGDRQGI

SEQ ID NO: 133461 - protein, 10 aa, synthetic construct
NHQRGDRQGI

SEQ ID NO: 133462 - protein, 10 aa, synthetic construct
NHDRGDRQGI

SEQ ID NO: 133463 - protein, 10 aa, synthetic construct
NHERGDRQGI

SEQ ID NO: 133464 - protein, 10 aa, synthetic construct
NSGRGDRQGI

SEQ ID NO: 133465 - protein, 10 aa, synthetic construct
NSARGDRQGI

SEQ ID NO: 133466 - protein, 10 aa, synthetic construct
NSVRGDRQGI

SEQ ID NO: 133467 - protein, 10 aa, synthetic construct
NSPRGDRQGI

SEQ ID NO: 133468 - protein, 10 aa, synthetic construct
NSLRGDRQGI

SEQ ID NO: 133469 - protein, 10 aa, synthetic construct
NSIRGDRQGI

SEQ ID NO: 133470 - protein, 10 aa, synthetic construct
NSMRGDRQGI

SEQ ID NO: 133471 - protein, 10 aa, synthetic construct
NSWRGDRQGI

SEQ ID NO: 133472 - protein, 10 aa, synthetic construct
NSFRGDRQGI

SEQ ID NO: 133473 - protein, 10 aa, synthetic construct
NSKRGDRQGI

SEQ ID NO: 133474 - protein, 10 aa, synthetic construct
NSRRGDRQGI

SEQ ID NO: 133475 - protein, 10 aa, synthetic construct
NSHRGDRQGI

SEQ ID NO: 133476 - protein, 10 aa, synthetic construct
NSSRGDRQGI

SEQ ID NO: 133477 - protein, 10 aa, synthetic construct
NSTRGDRQGI

SEQ ID NO: 133478 - protein, 10 aa, synthetic construct
NSYRGDRQGI

SEQ ID NO: 133479 - protein, 10 aa, synthetic construct
NSNRGDRQGI

SEQ ID NO: 133480 - protein, 10 aa, synthetic construct
NSQRGDRQGI

SEQ ID NO: 133481 - protein, 10 aa, synthetic construct
NSDRGDRQGI

SEQ ID NO: 133482 - protein, 10 aa, synthetic construct
NSERGDRQGI

SEQ ID NO: 133483 - protein, 10 aa, synthetic construct
NTGRGDRQGI

SEQ ID NO: 133484 - protein, 10 aa, synthetic construct
NTARGDRQGI

SEQ ID NO: 133485 - protein, 10 aa, synthetic construct
NTVRGDRQGI

SEQ ID NO: 133486 - protein, 10 aa, synthetic construct
NTPRGDRQGI

SEQ ID NO: 133487 - protein, 10 aa, synthetic construct
NTLRGDRQGI

SEQ ID NO: 133488 - protein, 10 aa, synthetic construct
NTIRGDRQGI

SEQ ID NO: 133489 - protein, 10 aa, synthetic construct
NTMRGDRQGI

SEQ ID NO: 133490 - protein, 10 aa, synthetic construct
NTWRGDRQGI

SEQ ID NO: 133491 - protein, 10 aa, synthetic construct
NTFRGDRQGI

SEQ ID NO: 133492 - protein, 10 aa, synthetic construct
NTKRGDRQGI

SEQ ID NO: 133493 - protein, 10 aa, synthetic construct
NTRRGDRQGI

SEQ ID NO: 133494 - protein, 10 aa, synthetic construct
NTHRGDRQGI

SEQ ID NO: 133495 - protein, 10 aa, synthetic construct
NTSRGDRQGI

SEQ ID NO: 133496 - protein, 10 aa, synthetic construct
NTTRGDRQGI

SEQ ID NO: 133497 - protein, 10 aa, synthetic construct
NTYRGDRQGI

SEQ ID NO: 133498 - protein, 10 aa, synthetic construct
NTNRGDRQGI

SEQ ID NO: 133499 - protein, 10 aa, synthetic construct
NTQRGDRQGI

SEQ ID NO: 133500 - protein, 10 aa, synthetic construct
NTDRGDRQGI

SEQ ID NO: 133501 - protein, 10 aa, synthetic construct
NTERGDRQGI

SEQ ID NO: 133502 - protein, 10 aa, synthetic construct
NYGRGDRQGI

SEQ ID NO: 133503 - protein, 10 aa, synthetic construct
NYARGDRQGI

SEQ ID NO: 133504 - protein, 10 aa, synthetic construct
NYVRGDRQGI

SEQ ID NO: 133505 - protein, 10 aa, synthetic construct
NYPRGDRQGI

SEQ ID NO: 133506 - protein, 10 aa, synthetic construct
NYLRGDRQGI

SEQ ID NO: 133507 - protein, 10 aa, synthetic construct
NYIRGDRQGI

SEQ ID NO: 133508 - protein, 10 aa, synthetic construct
NYMRGDRQGI

SEQ ID NO: 133509 - protein, 10 aa, synthetic construct
NYWRGDRQGI

SEQ ID NO: 133510 - protein, 10 aa, synthetic construct
NYFRGDRQGI

SEQ ID NO: 133511 - protein, 10 aa, synthetic construct
NYKRGDRQGI

SEQ ID NO: 133512 - protein, 10 aa, synthetic construct
NYRRGDRQGI

SEQ ID NO: 133513 - protein, 10 aa, synthetic construct
NYHRGDRQGI

SEQ ID NO: 133514 - protein, 10 aa, synthetic construct
NYSRGDRQGI

SEQ ID NO: 133515 - protein, 10 aa, synthetic construct
NYTRGDRQGI

SEQ ID NO: 133516 - protein, 10 aa, synthetic construct
NYYRGDRQGI

SEQ ID NO: 133517 - protein, 10 aa, synthetic construct
NYNRGDRQGI

SEQ ID NO: 133518 - protein, 10 aa, synthetic construct
NYQRGDRQGI

SEQ ID NO: 133519 - protein, 10 aa, synthetic construct
NYDRGDRQGI

SEQ ID NO: 133520 - protein, 10 aa, synthetic construct
NYERGDRQGI

SEQ ID NO: 133521 - protein, 10 aa, synthetic construct
NNGRGDRQGI

SEQ ID NO: 133522 - protein, 10 aa, synthetic construct
NNARGDRQGI

SEQ ID NO: 133523 - protein, 10 aa, synthetic construct
NNVRGDRQGI

SEQ ID NO: 133524 - protein, 10 aa, synthetic construct
NNPRGDRQGI

SEQ ID NO: 133525 - protein, 10 aa, synthetic construct
NNLRGDRQGI

SEQ ID NO: 133526 - protein, 10 aa, synthetic construct
NNIRGDRQGI

SEQ ID NO: 133527 - protein, 10 aa, synthetic construct
NNMRGDRQGI

SEQ ID NO: 133528 - protein, 10 aa, synthetic construct
NNWRGDRQGI

SEQ ID NO: 133529 - protein, 10 aa, synthetic construct
NNFRGDRQGI

SEQ ID NO: 133530 - protein, 10 aa, synthetic construct
NNKRGDRQGI

SEQ ID NO: 133531 - protein, 10 aa, synthetic construct
NNRRGDRQGI

SEQ ID NO: 133532 - protein, 10 aa, synthetic construct
NNHRGDRQGI

SEQ ID NO: 133533 - protein, 10 aa, synthetic construct
NNSRGDRQGI

SEQ ID NO: 133534 - protein, 10 aa, synthetic construct
NNTRGDRQGI

SEQ ID NO: 133535 - protein, 10 aa, synthetic construct
NNYRGDRQGI

SEQ ID NO: 133536 - protein, 10 aa, synthetic construct
NNNRGDRQGI

SEQ ID NO: 133537 - protein, 10 aa, synthetic construct
NNQRGDRQGI

SEQ ID NO: 133538 - protein, 10 aa, synthetic construct
NNDRGDRQGI

SEQ ID NO: 133539 - protein, 10 aa, synthetic construct
NNERGDRQGI

SEQ ID NO: 133540 - protein, 10 aa, synthetic construct
NQGRGDRQGI

SEQ ID NO: 133541 - protein, 10 aa, synthetic construct
NQARGDRQGI

SEQ ID NO: 133542 - protein, 10 aa, synthetic construct
NQVRGDRQGI

SEQ ID NO: 133543 - protein, 10 aa, synthetic construct
NQPRGDRQGI

SEQ ID NO: 133544 - protein, 10 aa, synthetic construct
NQLRGDRQGI

SEQ ID NO: 133545 - protein, 10 aa, synthetic construct
NQIRGDRQGI

SEQ ID NO: 133546 - protein, 10 aa, synthetic construct
NQMRGDRQGI

SEQ ID NO: 133547 - protein, 10 aa, synthetic construct
NQWRGDRQGI

SEQ ID NO: 133548 - protein, 10 aa, synthetic construct
NQFRGDRQGI

SEQ ID NO: 133549 - protein, 10 aa, synthetic construct
NQKRGDRQGI

SEQ ID NO: 133550 - protein, 10 aa, synthetic construct
NQRRGDRQGI

SEQ ID NO: 133551 - protein, 10 aa, synthetic construct
NQHRGDRQGI

SEQ ID NO: 133552 - protein, 10 aa, synthetic construct
NQSRGDRQGI

SEQ ID NO: 133553 - protein, 10 aa, synthetic construct
NQTRGDRQGI

SEQ ID NO: 133554 - protein, 10 aa, synthetic construct
NQYRGDRQGI

SEQ ID NO: 133555 - protein, 10 aa, synthetic construct
NQNRGDRQGI

SEQ ID NO: 133556 - protein, 10 aa, synthetic construct
NQQRGDRQGI

SEQ ID NO: 133557 - protein, 10 aa, synthetic construct
NQDRGDRQGI

SEQ ID NO: 133558 - protein, 10 aa, synthetic construct
NQERGDRQGI

SEQ ID NO: 133559 - protein, 10 aa, synthetic construct
NDGRGDRQGI

SEQ ID NO: 133560 - protein, 10 aa, synthetic construct
NDARGDRQGI

SEQ ID NO: 133561 - protein, 10 aa, synthetic construct
NDVRGDRQGI

SEQ ID NO: 133562 - protein, 10 aa, synthetic construct
NDPRGDRQGI

SEQ ID NO: 133563 - protein, 10 aa, synthetic construct
NDLRGDRQGI

SEQ ID NO: 133564 - protein, 10 aa, synthetic construct
NDIRGDRQGI

SEQ ID NO: 133565 - protein, 10 aa, synthetic construct
NDMRGDRQGI

SEQ ID NO: 133566 - protein, 10 aa, synthetic construct
NDWRGDRQGI

SEQ ID NO: 133567 - protein, 10 aa, synthetic construct
NDFRGDRQGI

SEQ ID NO: 133568 - protein, 10 aa, synthetic construct
NDKRGDRQGI

SEQ ID NO: 133569 - protein, 10 aa, synthetic construct
NDRRGDRQGI

SEQ ID NO: 133570 - protein, 10 aa, synthetic construct
NDHRGDRQGI

SEQ ID NO: 133571 - protein, 10 aa, synthetic construct
NDSRGDRQGI

SEQ ID NO: 133572 - protein, 10 aa, synthetic construct
NDTRGDRQGI

SEQ ID NO: 133573 - protein, 10 aa, synthetic construct
NDYRGDRQGI

SEQ ID NO: 133574 - protein, 10 aa, synthetic construct
NDNRGDRQGI

SEQ ID NO: 133575 - protein, 10 aa, synthetic construct
NDQRGDRQGI

SEQ ID NO: 133576 - protein, 10 aa, synthetic construct
NDDRGDRQGI

SEQ ID NO: 133577 - protein, 10 aa, synthetic construct
NDERGDRQGI

SEQ ID NO: 133578 - protein, 10 aa, synthetic construct
NEGRGDRQGI

SEQ ID NO: 133579 - protein, 10 aa, synthetic construct
NEARGDRQGI

SEQ ID NO: 133580 - protein, 10 aa, synthetic construct
NEVRGDRQGI

SEQ ID NO: 133581 - protein, 10 aa, synthetic construct
NEPRGDRQGI

SEQ ID NO: 133582 - protein, 10 aa, synthetic construct
NELRGDRQGI

SEQ ID NO: 133583 - protein, 10 aa, synthetic construct
NEIRGDRQGI

SEQ ID NO: 133584 - protein, 10 aa, synthetic construct
NEMRGDRQGI

SEQ ID NO: 133585 - protein, 10 aa, synthetic construct
NEWRGDRQGI

SEQ ID NO: 133586 - protein, 10 aa, synthetic construct
NEFRGDRQGI

SEQ ID NO: 133587 - protein, 10 aa, synthetic construct
NEKRGDRQGI

SEQ ID NO: 133588 - protein, 10 aa, synthetic construct
NERRGDRQGI

SEQ ID NO: 133589 - protein, 10 aa, synthetic construct
NEHRGDRQGI

SEQ ID NO: 133590 - protein, 10 aa, synthetic construct
NESRGDRQGI

SEQ ID NO: 133591 - protein, 10 aa, synthetic construct
NETRGDRQGI

SEQ ID NO: 133592 - protein, 10 aa, synthetic construct
NEYRGDRQGI

SEQ ID NO: 133593 - protein, 10 aa, synthetic construct
NENRGDRQGI

SEQ ID NO: 133594 - protein, 10 aa, synthetic construct
NEQRGDRQGI

SEQ ID NO: 133595 - protein, 10 aa, synthetic construct
NEDRGDRQGI

SEQ ID NO: 133596 - protein, 10 aa, synthetic construct
NEERGDRQGI

SEQ ID NO: 133597 - protein, 10 aa, synthetic construct
DGGRGDRQGI

SEQ ID NO: 133598 - protein, 10 aa, synthetic construct
DGARGDRQGI

SEQ ID NO: 133599 - protein, 10 aa, synthetic construct
DGVRGDRQGI

SEQ ID NO: 133600 - protein, 10 aa, synthetic construct
DGPRGDRQGI

SEQ ID NO: 133601 - protein, 10 aa, synthetic construct
DGLRGDRQGI

SEQ ID NO: 133602 - protein, 10 aa, synthetic construct
DGIRGDRQGI

SEQ ID NO: 133603 - protein, 10 aa, synthetic construct
DGMRGDRQGI

SEQ ID NO: 133604 - protein, 10 aa, synthetic construct
DGWRGDRQGI

SEQ ID NO: 133605 - protein, 10 aa, synthetic construct
DGFRGDRQGI

SEQ ID NO: 133606 - protein, 10 aa, synthetic construct
DGKRGDRQGI

SEQ ID NO: 133607 - protein, 10 aa, synthetic construct
DGRRGDRQGI

SEQ ID NO: 133608 - protein, 10 aa, synthetic construct
DGHRGDRQGI

SEQ ID NO: 133609 - protein, 10 aa, synthetic construct
DGSRGDRQGI

SEQ ID NO: 133610 - protein, 10 aa, synthetic construct
DGTRGDRQGI

SEQ ID NO: 133611 - protein, 10 aa, synthetic construct
DGYRGDRQGI

SEQ ID NO: 133612 - protein, 10 aa, synthetic construct
DGNRGDRQGI

SEQ ID NO: 133613 - protein, 10 aa, synthetic construct
DGQRGDRQGI

SEQ ID NO: 133614 - protein, 10 aa, synthetic construct
DGDRGDRQGI

SEQ ID NO: 133615 - protein, 10 aa, synthetic construct
DGERGDRQGI

SEQ ID NO: 133616 - protein, 10 aa, synthetic construct
DAGRGDRQGI

SEQ ID NO: 133617 - protein, 10 aa, synthetic construct
DAARGDRQGI

SEQ ID NO: 133618 - protein, 10 aa, synthetic construct
DAVRGDRQGI

SEQ ID NO: 133619 - protein, 10 aa, synthetic construct
DAPRGDRQGI

SEQ ID NO: 133620 - protein, 10 aa, synthetic construct
DALRGDRQGI

SEQ ID NO: 133621 - protein, 10 aa, synthetic construct
DAIRGDRQGI

SEQ ID NO: 133622 - protein, 10 aa, synthetic construct
DAMRGDRQGI

SEQ ID NO: 133623 - protein, 10 aa, synthetic construct
DAWRGDRQGI

SEQ ID NO: 133624 - protein, 10 aa, synthetic construct
DAFRGDRQGI

SEQ ID NO: 133625 - protein, 10 aa, synthetic construct
DAKRGDRQGI

SEQ ID NO: 133626 - protein, 10 aa, synthetic construct
DARRGDRQGI

SEQ ID NO: 133627 - protein, 10 aa, synthetic construct
DAHRGDRQGI

SEQ ID NO: 133628 - protein, 10 aa, synthetic construct
DASRGDRQGI

SEQ ID NO: 133629 - protein, 10 aa, synthetic construct
DATRGDRQGI

SEQ ID NO: 133630 - protein, 10 aa, synthetic construct
DAYRGDRQGI

SEQ ID NO: 133631 - protein, 10 aa, synthetic construct
DANRGDRQGI

SEQ ID NO: 133632 - protein, 10 aa, synthetic construct
DAQRGDRQGI

SEQ ID NO: 133633 - protein, 10 aa, synthetic construct
DADRGDRQGI

SEQ ID NO: 133634 - protein, 10 aa, synthetic construct
DAERGDRQGI

SEQ ID NO: 133635 - protein, 10 aa, synthetic construct
DVGRGDRQGI

SEQ ID NO: 133636 - protein, 10 aa, synthetic construct
DVARGDRQGI

SEQ ID NO: 133637 - protein, 10 aa, synthetic construct
DVVRGDRQGI

SEQ ID NO: 133638 - protein, 10 aa, synthetic construct
DVPRGDRQGI

SEQ ID NO: 133639 - protein, 10 aa, synthetic construct
DVLRGDRQGI

SEQ ID NO: 133640 - protein, 10 aa, synthetic construct
DVIRGDRQGI

SEQ ID NO: 133641 - protein, 10 aa, synthetic construct
DVMRGDRQGI

SEQ ID NO: 133642 - protein, 10 aa, synthetic construct
DVWRGDRQGI

SEQ ID NO: 133643 - protein, 10 aa, synthetic construct
DVFRGDRQGI

SEQ ID NO: 133644 - protein, 10 aa, synthetic construct
DVKRGDRQGI

SEQ ID NO: 133645 - protein, 10 aa, synthetic construct
DVRRGDRQGI

SEQ ID NO: 133646 - protein, 10 aa, synthetic construct
DVHRGDRQGI

SEQ ID NO: 133647 - protein, 10 aa, synthetic construct
DVSRGDRQGI

SEQ ID NO: 133648 - protein, 10 aa, synthetic construct
DVTRGDRQGI

SEQ ID NO: 133649 - protein, 10 aa, synthetic construct
DVYRGDRQGI

SEQ ID NO: 133650 - protein, 10 aa, synthetic construct
DVNRGDRQGI

SEQ ID NO: 133651 - protein, 10 aa, synthetic construct
DVQRGDRQGI

SEQ ID NO: 133652 - protein, 10 aa, synthetic construct
DVDRGDRQGI

SEQ ID NO: 133653 - protein, 10 aa, synthetic construct
DVERGDRQGI

SEQ ID NO: 133654 - protein, 10 aa, synthetic construct
DPGRGDRQGI

SEQ ID NO: 133655 - protein, 10 aa, synthetic construct
DPARGDRQGI

SEQ ID NO: 133656 - protein, 10 aa, synthetic construct
DPVRGDRQGI

SEQ ID NO: 133657 - protein, 10 aa, synthetic construct
DPPRGDRQGI

SEQ ID NO: 133658 - protein, 10 aa, synthetic construct
DPLRGDRQGI

SEQ ID NO: 133659 - protein, 10 aa, synthetic construct
DPIRGDRQGI

SEQ ID NO: 133660 - protein, 10 aa, synthetic construct
DPMRGDRQGI

SEQ ID NO: 133661 - protein, 10 aa, synthetic construct
DPWRGDRQGI

SEQ ID NO: 133662 - protein, 10 aa, synthetic construct
DPFRGDRQGI

SEQ ID NO: 133663 - protein, 10 aa, synthetic construct
DPKRGDRQGI

SEQ ID NO: 133664 - protein, 10 aa, synthetic construct
DPRRGDRQGI

SEQ ID NO: 133665 - protein, 10 aa, synthetic construct
DPHRGDRQGI

SEQ ID NO: 133666 - protein, 10 aa, synthetic construct
DPSRGDRQGI

SEQ ID NO: 133667 - protein, 10 aa, synthetic construct
DPTRGDRQGI

SEQ ID NO: 133668 - protein, 10 aa, synthetic construct
DPYRGDRQGI

SEQ ID NO: 133669 - protein, 10 aa, synthetic construct
DPNRGDRQGI

SEQ ID NO: 133670 - protein, 10 aa, synthetic construct
DPQRGDRQGI

SEQ ID NO: 133671 - protein, 10 aa, synthetic construct
DPDRGDRQGI

SEQ ID NO: 133672 - protein, 10 aa, synthetic construct
DPERGDRQGI

SEQ ID NO: 133673 - protein, 10 aa, synthetic construct
DLGRGDRQGI

SEQ ID NO: 133674 - protein, 10 aa, synthetic construct
DLARGDRQGI

SEQ ID NO: 133675 - protein, 10 aa, synthetic construct
DLVRGDRQGI

SEQ ID NO: 133676 - protein, 10 aa, synthetic construct
DLPRGDRQGI

SEQ ID NO: 133677 - protein, 10 aa, synthetic construct
DLLRGDRQGI

SEQ ID NO: 133678 - protein, 10 aa, synthetic construct
DLIRGDRQGI

SEQ ID NO: 133679 - protein, 10 aa, synthetic construct
DLMRGDRQGI

SEQ ID NO: 133680 - protein, 10 aa, synthetic construct
DLWRGDRQGI

SEQ ID NO: 133681 - protein, 10 aa, synthetic construct
DLFRGDRQGI

SEQ ID NO: 133682 - protein, 10 aa, synthetic construct
DLKRGDRQGI

SEQ ID NO: 133683 - protein, 10 aa, synthetic construct
DLRRGDRQGI

SEQ ID NO: 133684 - protein, 10 aa, synthetic construct
DLHRGDRQGI

SEQ ID NO: 133685 - protein, 10 aa, synthetic construct
DLSRGDRQGI

SEQ ID NO: 133686 - protein, 10 aa, synthetic construct
DLTRGDRQGI

SEQ ID NO: 133687 - protein, 10 aa, synthetic construct
DLYRGDRQGI

SEQ ID NO: 133688 - protein, 10 aa, synthetic construct
DLNRGDRQGI

SEQ ID NO: 133689 - protein, 10 aa, synthetic construct
DLQRGDRQGI

SEQ ID NO: 133690 - protein, 10 aa, synthetic construct
DLDRGDRQGI

SEQ ID NO: 133691 - protein, 10 aa, synthetic construct
DLERGDRQGI

SEQ ID NO: 133692 - protein, 10 aa, synthetic construct
DIGRGDRQGI

SEQ ID NO: 133693 - protein, 10 aa, synthetic construct
DIARGDRQGI

SEQ ID NO: 133694 - protein, 10 aa, synthetic construct
DIVRGDRQGI

SEQ ID NO: 133695 - protein, 10 aa, synthetic construct
DIPRGDRQGI

SEQ ID NO: 133696 - protein, 10 aa, synthetic construct
DILRGDRQGI

SEQ ID NO: 133697 - protein, 10 aa, synthetic construct
DIIRGDRQGI

SEQ ID NO: 133698 - protein, 10 aa, synthetic construct
DIMRGDRQGI

SEQ ID NO: 133699 - protein, 10 aa, synthetic construct
DIWRGDRQGI

SEQ ID NO: 133700 - protein, 10 aa, synthetic construct
DIFRGDRQGI

SEQ ID NO: 133701 - protein, 10 aa, synthetic construct
DIKRGDRQGI

SEQ ID NO: 133702 - protein, 10 aa, synthetic construct
DIRRGDRQGI

SEQ ID NO: 133703 - protein, 10 aa, synthetic construct
DIHRGDRQGI

SEQ ID NO: 133704 - protein, 10 aa, synthetic construct
DISRGDRQGI

SEQ ID NO: 133705 - protein, 10 aa, synthetic construct
DITRGDRQGI

SEQ ID NO: 133706 - protein, 10 aa, synthetic construct
DIYRGDRQGI

SEQ ID NO: 133707 - protein, 10 aa, synthetic construct
DINRGDRQGI

SEQ ID NO: 133708 - protein, 10 aa, synthetic construct
DIQRGDRQGI

SEQ ID NO: 133709 - protein, 10 aa, synthetic construct
DIDRGDRQGI

SEQ ID NO: 133710 - protein, 10 aa, synthetic construct
DIERGDRQGI

SEQ ID NO: 133711 - protein, 10 aa, synthetic construct
DMGRGDRQGI

SEQ ID NO: 133712 - protein, 10 aa, synthetic construct
DMARGDRQGI

SEQ ID NO: 133713 - protein, 10 aa, synthetic construct
DMVRGDRQGI

SEQ ID NO: 133714 - protein, 10 aa, synthetic construct
DMPRGDRQGI

SEQ ID NO: 133715 - protein, 10 aa, synthetic construct
DMLRGDRQGI

SEQ ID NO: 133716 - protein, 10 aa, synthetic construct
DMIRGDRQGI

SEQ ID NO: 133717 - protein, 10 aa, synthetic construct
DMMRGDRQGI

SEQ ID NO: 133718 - protein, 10 aa, synthetic construct
DMWRGDRQGI

SEQ ID NO: 133719 - protein, 10 aa, synthetic construct
DMFRGDRQGI

SEQ ID NO: 133720 - protein, 10 aa, synthetic construct
DMKRGDRQGI

SEQ ID NO: 133721 - protein, 10 aa, synthetic construct
DMRRGDRQGI

SEQ ID NO: 133722 - protein, 10 aa, synthetic construct
DMHRGDRQGI

SEQ ID NO: 133723 - protein, 10 aa, synthetic construct
DMSRGDRQGI

SEQ ID NO: 133724 - protein, 10 aa, synthetic construct
DMTRGDRQGI

SEQ ID NO: 133725 - protein, 10 aa, synthetic construct
DMYRGDRQGI

SEQ ID NO: 133726 - protein, 10 aa, synthetic construct
DMNRGDRQGI

SEQ ID NO: 133727 - protein, 10 aa, synthetic construct
DMQRGDRQGI

SEQ ID NO: 133728 - protein, 10 aa, synthetic construct
DMDRGDRQGI

SEQ ID NO: 133729 - protein, 10 aa, synthetic construct
DMERGDRQGI

SEQ ID NO: 133730 - protein, 10 aa, synthetic construct
DWGRGDRQGI

SEQ ID NO: 133731 - protein, 10 aa, synthetic construct
DWARGDRQGI

SEQ ID NO: 133732 - protein, 10 aa, synthetic construct
DWVRGDRQGI

SEQ ID NO: 133733 - protein, 10 aa, synthetic construct
DWPRGDRQGI

SEQ ID NO: 133734 - protein, 10 aa, synthetic construct
DWLRGDRQGI

SEQ ID NO: 133735 - protein, 10 aa, synthetic construct
DWIRGDRQGI

SEQ ID NO: 133736 - protein, 10 aa, synthetic construct
DWMRGDRQGI

SEQ ID NO: 133737 - protein, 10 aa, synthetic construct
DWWRGDRQGI

SEQ ID NO: 133738 - protein, 10 aa, synthetic construct
DWFRGDRQGI

SEQ ID NO: 133739 - protein, 10 aa, synthetic construct
DWKRGDRQGI

SEQ ID NO: 133740 - protein, 10 aa, synthetic construct
DWRRGDRQGI

SEQ ID NO: 133741 - protein, 10 aa, synthetic construct
DWHRGDRQGI

SEQ ID NO: 133742 - protein, 10 aa, synthetic construct
DWSRGDRQGI

SEQ ID NO: 133743 - protein, 10 aa, synthetic construct
DWTRGDRQGI

SEQ ID NO: 133744 - protein, 10 aa, synthetic construct
DWYRGDRQGI

SEQ ID NO: 133745 - protein, 10 aa, synthetic construct
DWNRGDRQGI

SEQ ID NO: 133746 - protein, 10 aa, synthetic construct
DWQRGDRQGI

SEQ ID NO: 133747 - protein, 10 aa, synthetic construct
DWDRGDRQGI

SEQ ID NO: 133748 - protein, 10 aa, synthetic construct
DWERGDRQGI

SEQ ID NO: 133749 - protein, 10 aa, synthetic construct
DFGRGDRQGI

SEQ ID NO: 133750 - protein, 10 aa, synthetic construct
DFARGDRQGI

SEQ ID NO: 133751 - protein, 10 aa, synthetic construct
DFVRGDRQGI

SEQ ID NO: 133752 - protein, 10 aa, synthetic construct
DFPRGDRQGI

SEQ ID NO: 133753 - protein, 10 aa, synthetic construct
DFLRGDRQGI

SEQ ID NO: 133754 - protein, 10 aa, synthetic construct
DFIRGDRQGI

SEQ ID NO: 133755 - protein, 10 aa, synthetic construct
DFMRGDRQGI

SEQ ID NO: 133756 - protein, 10 aa, synthetic construct
DFWRGDRQGI

SEQ ID NO: 133757 - protein, 10 aa, synthetic construct
DFFRGDRQGI

SEQ ID NO: 133758 - protein, 10 aa, synthetic construct
DFKRGDRQGI

SEQ ID NO: 133759 - protein, 10 aa, synthetic construct
DFRRGDRQGI

SEQ ID NO: 133760 - protein, 10 aa, synthetic construct
DFHRGDRQGI

SEQ ID NO: 133761 - protein, 10 aa, synthetic construct
DFSRGDRQGI

SEQ ID NO: 133762 - protein, 10 aa, synthetic construct
DFTRGDRQGI

SEQ ID NO: 133763 - protein, 10 aa, synthetic construct
DFYRGDRQGI

SEQ ID NO: 133764 - protein, 10 aa, synthetic construct
DFNRGDRQGI

SEQ ID NO: 133765 - protein, 10 aa, synthetic construct
DFQRGDRQGI

SEQ ID NO: 133766 - protein, 10 aa, synthetic construct
DFDRGDRQGI

SEQ ID NO: 133767 - protein, 10 aa, synthetic construct
DFERGDRQGI

SEQ ID NO: 133768 - protein, 10 aa, synthetic construct
DKGRGDRQGI

SEQ ID NO: 133769 - protein, 10 aa, synthetic construct
DKARGDRQGI

SEQ ID NO: 133770 - protein, 10 aa, synthetic construct
DKVRGDRQGI

SEQ ID NO: 133771 - protein, 10 aa, synthetic construct
DKPRGDRQGI

SEQ ID NO: 133772 - protein, 10 aa, synthetic construct
DKLRGDRQGI

SEQ ID NO: 133773 - protein, 10 aa, synthetic construct
DKIRGDRQGI

SEQ ID NO: 133774 - protein, 10 aa, synthetic construct
DKMRGDRQGI

SEQ ID NO: 133775 - protein, 10 aa, synthetic construct
DKWRGDRQGI

SEQ ID NO: 133776 - protein, 10 aa, synthetic construct
DKFRGDRQGI

SEQ ID NO: 133777 - protein, 10 aa, synthetic construct
DKKRGDRQGI

SEQ ID NO: 133778 - protein, 10 aa, synthetic construct
DKRRGDRQGI

SEQ ID NO: 133779 - protein, 10 aa, synthetic construct
DKHRGDRQGI

SEQ ID NO: 133780 - protein, 10 aa, synthetic construct
DKSRGDRQGI

SEQ ID NO: 133781 - protein, 10 aa, synthetic construct
DKTRGDRQGI

SEQ ID NO: 133782 - protein, 10 aa, synthetic construct
DKYRGDRQGI

SEQ ID NO: 133783 - protein, 10 aa, synthetic construct
DKNRGDRQGI

SEQ ID NO: 133784 - protein, 10 aa, synthetic construct
DKQRGDRQGI

SEQ ID NO: 133785 - protein, 10 aa, synthetic construct
DKDRGDRQGI

SEQ ID NO: 133786 - protein, 10 aa, synthetic construct
DKERGDRQGI

SEQ ID NO: 133787 - protein, 10 aa, synthetic construct
DRGRGDRQGI

SEQ ID NO: 133788 - protein, 10 aa, synthetic construct
DRARGDRQGI

SEQ ID NO: 133789 - protein, 10 aa, synthetic construct
DRVRGDRQGI

SEQ ID NO: 133790 - protein, 10 aa, synthetic construct
DRPRGDRQGI

SEQ ID NO: 133791 - protein, 10 aa, synthetic construct
DRLRGDRQGI

SEQ ID NO: 133792 - protein, 10 aa, synthetic construct
DRIRGDRQGI

SEQ ID NO: 133793 - protein, 10 aa, synthetic construct
DRMRGDRQGI

SEQ ID NO: 133794 - protein, 10 aa, synthetic construct
DRWRGDRQGI

SEQ ID NO: 133795 - protein, 10 aa, synthetic construct
DRFRGDRQGI

SEQ ID NO: 133796 - protein, 10 aa, synthetic construct
DRKRGDRQGI

SEQ ID NO: 133797 - protein, 10 aa, synthetic construct
DRRRGDRQGI

SEQ ID NO: 133798 - protein, 10 aa, synthetic construct
DRHRGDRQGI

SEQ ID NO: 133799 - protein, 10 aa, synthetic construct
DRSRGDRQGI

SEQ ID NO: 133800 - protein, 10 aa, synthetic construct
DRTRGDRQGI

SEQ ID NO: 133801 - protein, 10 aa, synthetic construct
DRYRGDRQGI

SEQ ID NO: 133802 - protein, 10 aa, synthetic construct
DRNRGDRQGI

SEQ ID NO: 133803 - protein, 10 aa, synthetic construct
DRQRGDRQGI

SEQ ID NO: 133804 - protein, 10 aa, synthetic construct
DRDRGDRQGI

SEQ ID NO: 133805 - protein, 10 aa, synthetic construct
DRERGDRQGI

SEQ ID NO: 133806 - protein, 10 aa, synthetic construct
DHGRGDRQGI

SEQ ID NO: 133807 - protein, 10 aa, synthetic construct
DHARGDRQGI

SEQ ID NO: 133808 - protein, 10 aa, synthetic construct
DHVRGDRQGI

SEQ ID NO: 133809 - protein, 10 aa, synthetic construct
DHPRGDRQGI

SEQ ID NO: 133810 - protein, 10 aa, synthetic construct
DHLRGDRQGI

SEQ ID NO: 133811 - protein, 10 aa, synthetic construct
DHIRGDRQGI

SEQ ID NO: 133812 - protein, 10 aa, synthetic construct
DHMRGDRQGI

SEQ ID NO: 133813 - protein, 10 aa, synthetic construct
DHWRGDRQGI

SEQ ID NO: 133814 - protein, 10 aa, synthetic construct
DHFRGDRQGI

SEQ ID NO: 133815 - protein, 10 aa, synthetic construct
DHKRGDRQGI

SEQ ID NO: 133816 - protein, 10 aa, synthetic construct
DHRRGDRQGI

SEQ ID NO: 133817 - protein, 10 aa, synthetic construct
DHHRGDRQGI

SEQ ID NO: 133818 - protein, 10 aa, synthetic construct
DHSRGDRQGI

SEQ ID NO: 133819 - protein, 10 aa, synthetic construct
DHTRGDRQGI

SEQ ID NO: 133820 - protein, 10 aa, synthetic construct
DHYRGDRQGI

SEQ ID NO: 133821 - protein, 10 aa, synthetic construct
DHNRGDRQGI

SEQ ID NO: 133822 - protein, 10 aa, synthetic construct
DHQRGDRQGI

SEQ ID NO: 133823 - protein, 10 aa, synthetic construct
DHDRGDRQGI

SEQ ID NO: 133824 - protein, 10 aa, synthetic construct
DHERGDRQGI

SEQ ID NO: 133825 - protein, 10 aa, synthetic construct
DSGRGDRQGI

SEQ ID NO: 133826 - protein, 10 aa, synthetic construct
DSARGDRQGI

SEQ ID NO: 133827 - protein, 10 aa, synthetic construct
DSVRGDRQGI

SEQ ID NO: 133828 - protein, 10 aa, synthetic construct
DSPRGDRQGI

SEQ ID NO: 133829 - protein, 10 aa, synthetic construct
DSLRGDRQGI

SEQ ID NO: 133830 - protein, 10 aa, synthetic construct
DSIRGDRQGI

SEQ ID NO: 133831 - protein, 10 aa, synthetic construct
DSMRGDRQGI

SEQ ID NO: 133832 - protein, 10 aa, synthetic construct
DSWRGDRQGI

SEQ ID NO: 133833 - protein, 10 aa, synthetic construct
DSFRGDRQGI

SEQ ID NO: 133834 - protein, 10 aa, synthetic construct
DSKRGDRQGI

SEQ ID NO: 133835 - protein, 10 aa, synthetic construct
DSRRGDRQGI

SEQ ID NO: 133836 - protein, 10 aa, synthetic construct
DSHRGDRQGI

SEQ ID NO: 133837 - protein, 10 aa, synthetic construct
DSSRGDRQGI

SEQ ID NO: 133838 - protein, 10 aa, synthetic construct
DSTRGDRQGI

SEQ ID NO: 133839 - protein, 10 aa, synthetic construct
DSYRGDRQGI

SEQ ID NO: 133840 - protein, 10 aa, synthetic construct
DSNRGDRQGI

SEQ ID NO: 133841 - protein, 10 aa, synthetic construct
DSQRGDRQGI

SEQ ID NO: 133842 - protein, 10 aa, synthetic construct
DSDRGDRQGI

SEQ ID NO: 133843 - protein, 10 aa, synthetic construct
DSERGDRQGI

SEQ ID NO: 133844 - protein, 10 aa, synthetic construct
DTGRGDRQGI

SEQ ID NO: 133845 - protein, 10 aa, synthetic construct
DTARGDRQGI

SEQ ID NO: 133846 - protein, 10 aa, synthetic construct
DTVRGDRQGI

SEQ ID NO: 133847 - protein, 10 aa, synthetic construct
DTPRGDRQGI

SEQ ID NO: 133848 - protein, 10 aa, synthetic construct
DTLRGDRQGI

SEQ ID NO: 133849 - protein, 10 aa, synthetic construct
DTIRGDRQGI

SEQ ID NO: 133850 - protein, 10 aa, synthetic construct
DTMRGDRQGI

SEQ ID NO: 133851 - protein, 10 aa, synthetic construct
DTWRGDRQGI

SEQ ID NO: 133852 - protein, 10 aa, synthetic construct
DTFRGDRQGI

SEQ ID NO: 133853 - protein, 10 aa, synthetic construct
DTKRGDRQGI

SEQ ID NO: 133854 - protein, 10 aa, synthetic construct
DTRRGDRQGI

SEQ ID NO: 133855 - protein, 10 aa, synthetic construct
DTHRGDRQGI

SEQ ID NO: 133856 - protein, 10 aa, synthetic construct
DTSRGDRQGI

SEQ ID NO: 133857 - protein, 10 aa, synthetic construct
DTTRGDRQGI

SEQ ID NO: 133858 - protein, 10 aa, synthetic construct
DTYRGDRQGI

SEQ ID NO: 133859 - protein, 10 aa, synthetic construct
DTNRGDRQGI

SEQ ID NO: 133860 - protein, 10 aa, synthetic construct
DTQRGDRQGI

SEQ ID NO: 133861 - protein, 10 aa, synthetic construct
DTDRGDRQGI

SEQ ID NO: 133862 - protein, 10 aa, synthetic construct
DTERGDRQGI

SEQ ID NO: 133863 - protein, 10 aa, synthetic construct
DYGRGDRQGI

SEQ ID NO: 133864 - protein, 10 aa, synthetic construct
DYARGDRQGI

SEQ ID NO: 133865 - protein, 10 aa, synthetic construct
DYVRGDRQGI

SEQ ID NO: 133866 - protein, 10 aa, synthetic construct
DYPRGDRQGI

SEQ ID NO: 133867 - protein, 10 aa, synthetic construct
DYLRGDRQGI

SEQ ID NO: 133868 - protein, 10 aa, synthetic construct
DYIRGDRQGI

SEQ ID NO: 133869 - protein, 10 aa, synthetic construct
DYMRGDRQGI

SEQ ID NO: 133870 - protein, 10 aa, synthetic construct
DYWRGDRQGI

SEQ ID NO: 133871 - protein, 10 aa, synthetic construct
DYFRGDRQGI

SEQ ID NO: 133872 - protein, 10 aa, synthetic construct
DYKRGDRQGI

SEQ ID NO: 133873 - protein, 10 aa, synthetic construct
DYRRGDRQGI

SEQ ID NO: 133874 - protein, 10 aa, synthetic construct
DYHRGDRQGI

SEQ ID NO: 133875 - protein, 10 aa, synthetic construct
DYSRGDRQGI

SEQ ID NO: 133876 - protein, 10 aa, synthetic construct
DYTRGDRQGI

SEQ ID NO: 133877 - protein, 10 aa, synthetic construct
DYYRGDRQGI

SEQ ID NO: 133878 - protein, 10 aa, synthetic construct
DYNRGDRQGI

SEQ ID NO: 133879 - protein, 10 aa, synthetic construct
DYQRGDRQGI

SEQ ID NO: 133880 - protein, 10 aa, synthetic construct
DYDRGDRQGI

SEQ ID NO: 133881 - protein, 10 aa, synthetic construct
DYERGDRQGI

SEQ ID NO: 133882 - protein, 10 aa, synthetic construct
DNGRGDRQGI

SEQ ID NO: 133883 - protein, 10 aa, synthetic construct
DNARGDRQGI

SEQ ID NO: 133884 - protein, 10 aa, synthetic construct
DNVRGDRQGI

SEQ ID NO: 133885 - protein, 10 aa, synthetic construct
DNPRGDRQGI

SEQ ID NO: 133886 - protein, 10 aa, synthetic construct
DNLRGDRQGI

SEQ ID NO: 133887 - protein, 10 aa, synthetic construct
DNIRGDRQGI

SEQ ID NO: 133888 - protein, 10 aa, synthetic construct
DNMRGDRQGI

SEQ ID NO: 133889 - protein, 10 aa, synthetic construct
DNWRGDRQGI

SEQ ID NO: 133890 - protein, 10 aa, synthetic construct
DNFRGDRQGI

SEQ ID NO: 133891 - protein, 10 aa, synthetic construct
DNKRGDRQGI

SEQ ID NO: 133892 - protein, 10 aa, synthetic construct
DNRRGDRQGI

SEQ ID NO: 133893 - protein, 10 aa, synthetic construct
DNHRGDRQGI

SEQ ID NO: 133894 - protein, 10 aa, synthetic construct
DNSRGDRQGI

SEQ ID NO: 133895 - protein, 10 aa, synthetic construct
DNTRGDRQGI

SEQ ID NO: 133896 - protein, 10 aa, synthetic construct
DNYRGDRQGI

SEQ ID NO: 133897 - protein, 10 aa, synthetic construct
DNNRGDRQGI

SEQ ID NO: 133898 - protein, 10 aa, synthetic construct
DNQRGDRQGI

SEQ ID NO: 133899 - protein, 10 aa, synthetic construct
DNDRGDRQGI

SEQ ID NO: 133900 - protein, 10 aa, synthetic construct
DNERGDRQGI

SEQ ID NO: 133901 - protein, 10 aa, synthetic construct
DQGRGDRQGI

SEQ ID NO: 133902 - protein, 10 aa, synthetic construct
DQARGDRQGI

SEQ ID NO: 133903 - protein, 10 aa, synthetic construct
DQVRGDRQGI

SEQ ID NO: 133904 - protein, 10 aa, synthetic construct
DQPRGDRQGI

SEQ ID NO: 133905 - protein, 10 aa, synthetic construct
DQLRGDRQGI

SEQ ID NO: 133906 - protein, 10 aa, synthetic construct
DQIRGDRQGI

SEQ ID NO: 133907 - protein, 10 aa, synthetic construct
DQMRGDRQGI

SEQ ID NO: 133908 - protein, 10 aa, synthetic construct
DQWRGDRQGI

SEQ ID NO: 133909 - protein, 10 aa, synthetic construct
DQFRGDRQGI

SEQ ID NO: 133910 - protein, 10 aa, synthetic construct
DQKRGDRQGI

SEQ ID NO: 133911 - protein, 10 aa, synthetic construct
DQRRGDRQGI

SEQ ID NO: 133912 - protein, 10 aa, synthetic construct
DQHRGDRQGI

SEQ ID NO: 133913 - protein, 10 aa, synthetic construct
DQSRGDRQGI

SEQ ID NO: 133914 - protein, 10 aa, synthetic construct
DQTRGDRQGI

SEQ ID NO: 133915 - protein, 10 aa, synthetic construct
DQYRGDRQGI

SEQ ID NO: 133916 - protein, 10 aa, synthetic construct
DQNRGDRQGI

SEQ ID NO: 133917 - protein, 10 aa, synthetic construct
DQQRGDRQGI

SEQ ID NO: 133918 - protein, 10 aa, synthetic construct
DQDRGDRQGI

SEQ ID NO: 133919 - protein, 10 aa, synthetic construct
DQERGDRQGI

SEQ ID NO: 133920 - protein, 10 aa, synthetic construct
DDGRGDRQGI

SEQ ID NO: 133921 - protein, 10 aa, synthetic construct
DDARGDRQGI

SEQ ID NO: 133922 - protein, 10 aa, synthetic construct
DDVRGDRQGI

SEQ ID NO: 133923 - protein, 10 aa, synthetic construct
DDPRGDRQGI

SEQ ID NO: 133924 - protein, 10 aa, synthetic construct
DDLRGDRQGI

SEQ ID NO: 133925 - protein, 10 aa, synthetic construct
DDIRGDRQGI

SEQ ID NO: 133926 - protein, 10 aa, synthetic construct
DDMRGDRQGI

SEQ ID NO: 133927 - protein, 10 aa, synthetic construct
DDWRGDRQGI

SEQ ID NO: 133928 - protein, 10 aa, synthetic construct
DDFRGDRQGI

SEQ ID NO: 133929 - protein, 10 aa, synthetic construct
DDKRGDRQGI

SEQ ID NO: 133930 - protein, 10 aa, synthetic construct
DDRRGDRQGI

SEQ ID NO: 133931 - protein, 10 aa, synthetic construct
DDHRGDRQGI

SEQ ID NO: 133932 - protein, 10 aa, synthetic construct
DDSRGDRQGI

SEQ ID NO: 133933 - protein, 10 aa, synthetic construct
DDTRGDRQGI

SEQ ID NO: 133934 - protein, 10 aa, synthetic construct
DDYRGDRQGI

SEQ ID NO: 133935 - protein, 10 aa, synthetic construct
DDNRGDRQGI

SEQ ID NO: 133936 - protein, 10 aa, synthetic construct
DDQRGDRQGI

SEQ ID NO: 133937 - protein, 10 aa, synthetic construct
DDDRGDRQGI

SEQ ID NO: 133938 - protein, 10 aa, synthetic construct
DDERGDRQGI

SEQ ID NO: 133939 - protein, 10 aa, synthetic construct
DEGRGDRQGI

SEQ ID NO: 133940 - protein, 10 aa, synthetic construct
DEARGDRQGI

SEQ ID NO: 133941 - protein, 10 aa, synthetic construct
DEVRGDRQGI

SEQ ID NO: 133942 - protein, 10 aa, synthetic construct
DEPRGDRQGI

SEQ ID NO: 133943 - protein, 10 aa, synthetic construct
DELRGDRQGI

SEQ ID NO: 133944 - protein, 10 aa, synthetic construct
DEIRGDRQGI

SEQ ID NO: 133945 - protein, 10 aa, synthetic construct
DEMRGDRQGI

SEQ ID NO: 133946 - protein, 10 aa, synthetic construct
DEWRGDRQGI

SEQ ID NO: 133947 - protein, 10 aa, synthetic construct
DEFRGDRQGI

SEQ ID NO: 133948 - protein, 10 aa, synthetic construct
DEKRGDRQGI

SEQ ID NO: 133949 - protein, 10 aa, synthetic construct
DERRGDRQGI

SEQ ID NO: 133950 - protein, 10 aa, synthetic construct
DEHRGDRQGI

SEQ ID NO: 133951 - protein, 10 aa, synthetic construct
DESRGDRQGI

SEQ ID NO: 133952 - protein, 10 aa, synthetic construct
DETRGDRQGI

SEQ ID NO: 133953 - protein, 10 aa, synthetic construct
DEYRGDRQGI

SEQ ID NO: 133954 - protein, 10 aa, synthetic construct
DENRGDRQGI

SEQ ID NO: 133955 - protein, 10 aa, synthetic construct
DEQRGDRQGI

SEQ ID NO: 133956 - protein, 10 aa, synthetic construct
DEDRGDRQGI

SEQ ID NO: 133957 - protein, 10 aa, synthetic construct
DEERGDRQGI

SEQ ID NO: 133958 - protein, 10 aa, synthetic construct
QGGRGDRQGI

SEQ ID NO: 133959 - protein, 10 aa, synthetic construct
QGARGDRQGI

SEQ ID NO: 133960 - protein, 10 aa, synthetic construct
QGVRGDRQGI

SEQ ID NO: 133961 - protein, 10 aa, synthetic construct
QGPRGDRQGI

SEQ ID NO: 133962 - protein, 10 aa, synthetic construct
QGLRGDRQGI

SEQ ID NO: 133963 - protein, 10 aa, synthetic construct
QGIRGDRQGI

SEQ ID NO: 133964 - protein, 10 aa, synthetic construct
QGMRGDRQGI

SEQ ID NO: 133965 - protein, 10 aa, synthetic construct
QGWRGDRQGI

SEQ ID NO: 133966 - protein, 10 aa, synthetic construct
QGFRGDRQGI

SEQ ID NO: 133967 - protein, 10 aa, synthetic construct
QGKRGDRQGI

SEQ ID NO: 133968 - protein, 10 aa, synthetic construct
QGRRGDRQGI

SEQ ID NO: 133969 - protein, 10 aa, synthetic construct
QGHRGDRQGI

SEQ ID NO: 133970 - protein, 10 aa, synthetic construct
QGSRGDRQGI

SEQ ID NO: 133971 - protein, 10 aa, synthetic construct
QGTRGDRQGI

SEQ ID NO: 133972 - protein, 10 aa, synthetic construct
QGYRGDRQGI

SEQ ID NO: 133973 - protein, 10 aa, synthetic construct
QGNRGDRQGI

SEQ ID NO: 133974 - protein, 10 aa, synthetic construct
QGQRGDRQGI

SEQ ID NO: 133975 - protein, 10 aa, synthetic construct
QGDRGDRQGI

SEQ ID NO: 133976 - protein, 10 aa, synthetic construct
QGERGDRQGI

SEQ ID NO: 133977 - protein, 10 aa, synthetic construct
QAGRGDRQGI

SEQ ID NO: 133978 - protein, 10 aa, synthetic construct
QAARGDRQGI

SEQ ID NO: 133979 - protein, 10 aa, synthetic construct
QAVRGDRQGI

SEQ ID NO: 133980 - protein, 10 aa, synthetic construct
QAPRGDRQGI

SEQ ID NO: 133981 - protein, 10 aa, synthetic construct
QALRGDRQGI

SEQ ID NO: 133982 - protein, 10 aa, synthetic construct
QAIRGDRQGI

SEQ ID NO: 133983 - protein, 10 aa, synthetic construct
QAMRGDRQGI

SEQ ID NO: 133984 - protein, 10 aa, synthetic construct
QAWRGDRQGI

SEQ ID NO: 133985 - protein, 10 aa, synthetic construct
QAFRGDRQGI

SEQ ID NO: 133986 - protein, 10 aa, synthetic construct
QAKRGDRQGI

SEQ ID NO: 133987 - protein, 10 aa, synthetic construct
QARRGDRQGI

SEQ ID NO: 133988 - protein, 10 aa, synthetic construct
QAHRGDRQGI

SEQ ID NO: 133989 - protein, 10 aa, synthetic construct
QASRGDRQGI

SEQ ID NO: 133990 - protein, 10 aa, synthetic construct
QATRGDRQGI

SEQ ID NO: 133991 - protein, 10 aa, synthetic construct
QAYRGDRQGI

SEQ ID NO: 133992 - protein, 10 aa, synthetic construct
QANRGDRQGI

SEQ ID NO: 133993 - protein, 10 aa, synthetic construct
QAQRGDRQGI

SEQ ID NO: 133994 - protein, 10 aa, synthetic construct
QADRGDRQGI

SEQ ID NO: 133995 - protein, 10 aa, synthetic construct
QAERGDRQGI

SEQ ID NO: 133996 - protein, 10 aa, synthetic construct
QVGRGDRQGI

SEQ ID NO: 133997 - protein, 10 aa, synthetic construct
QVARGDRQGI

SEQ ID NO: 133998 - protein, 10 aa, synthetic construct
QVVRGDRQGI

SEQ ID NO: 133999 - protein, 10 aa, synthetic construct
QVPRGDRQGI

SEQ ID NO: 134000 - protein, 10 aa, synthetic construct
QVLRGDRQGI

SEQ ID NO: 134001 - protein, 10 aa, synthetic construct
QVIRGDRQGI

SEQ ID NO: 134002 - protein, 10 aa, synthetic construct
QVMRGDRQGI

SEQ ID NO: 134003 - protein, 10 aa, synthetic construct
QVWRGDRQGI

SEQ ID NO: 134004 - protein, 10 aa, synthetic construct
QVFRGDRQGI

SEQ ID NO: 134005 - protein, 10 aa, synthetic construct
QVKRGDRQGI

SEQ ID NO: 134006 - protein, 10 aa, synthetic construct
QVRRGDRQGI

SEQ ID NO: 134007 - protein, 10 aa, synthetic construct
QVHRGDRQGI

SEQ ID NO: 134008 - protein, 10 aa, synthetic construct
QVSRGDRQGI

SEQ ID NO: 134009 - protein, 10 aa, synthetic construct
QVTRGDRQGI

SEQ ID NO: 134010 - protein, 10 aa, synthetic construct
QVYRGDRQGI

SEQ ID NO: 134011 - protein, 10 aa, synthetic construct
QVNRGDRQGI

SEQ ID NO: 134012 - protein, 10 aa, synthetic construct
QVQRGDRQGI

SEQ ID NO: 134013 - protein, 10 aa, synthetic construct
QVDRGDRQGI

SEQ ID NO: 134014 - protein, 10 aa, synthetic construct
QVERGDRQGI

SEQ ID NO: 134015 - protein, 10 aa, synthetic construct
QPGRGDRQGI

SEQ ID NO: 134016 - protein, 10 aa, synthetic construct
QPARGDRQGI

SEQ ID NO: 134017 - protein, 10 aa, synthetic construct
QPVRGDRQGI

SEQ ID NO: 134018 - protein, 10 aa, synthetic construct
QPPRGDRQGI

SEQ ID NO: 134019 - protein, 10 aa, synthetic construct
QPLRGDRQGI

SEQ ID NO: 134020 - protein, 10 aa, synthetic construct
QPIRGDRQGI

SEQ ID NO: 134021 - protein, 10 aa, synthetic construct
QPMRGDRQGI

SEQ ID NO: 134022 - protein, 10 aa, synthetic construct
QPWRGDRQGI

SEQ ID NO: 134023 - protein, 10 aa, synthetic construct
QPFRGDRQGI

SEQ ID NO: 134024 - protein, 10 aa, synthetic construct
QPKRGDRQGI

SEQ ID NO: 134025 - protein, 10 aa, synthetic construct
QPRRGDRQGI

SEQ ID NO: 134026 - protein, 10 aa, synthetic construct
QPHRGDRQGI

SEQ ID NO: 134027 - protein, 10 aa, synthetic construct
QPSRGDRQGI

SEQ ID NO: 134028 - protein, 10 aa, synthetic construct
QPTRGDRQGI

SEQ ID NO: 134029 - protein, 10 aa, synthetic construct
QPYRGDRQGI

SEQ ID NO: 134030 - protein, 10 aa, synthetic construct
QPNRGDRQGI

SEQ ID NO: 134031 - protein, 10 aa, synthetic construct
QPQRGDRQGI

SEQ ID NO: 134032 - protein, 10 aa, synthetic construct
QPDRGDRQGI

SEQ ID NO: 134033 - protein, 10 aa, synthetic construct
QPERGDRQGI

SEQ ID NO: 134034 - protein, 10 aa, synthetic construct
QLGRGDRQGI

SEQ ID NO: 134035 - protein, 10 aa, synthetic construct
QLARGDRQGI

SEQ ID NO: 134036 - protein, 10 aa, synthetic construct
QLVRGDRQGI

SEQ ID NO: 134037 - protein, 10 aa, synthetic construct
QLPRGDRQGI

SEQ ID NO: 134038 - protein, 10 aa, synthetic construct
QLLRGDRQGI

SEQ ID NO: 134039 - protein, 10 aa, synthetic construct
QLIRGDRQGI

SEQ ID NO: 134040 - protein, 10 aa, synthetic construct
QLMRGDRQGI

SEQ ID NO: 134041 - protein, 10 aa, synthetic construct
QLWRGDRQGI

SEQ ID NO: 134042 - protein, 10 aa, synthetic construct
QLFRGDRQGI

SEQ ID NO: 134043 - protein, 10 aa, synthetic construct
QLKRGDRQGI

SEQ ID NO: 134044 - protein, 10 aa, synthetic construct
QLRRGDRQGI

SEQ ID NO: 134045 - protein, 10 aa, synthetic construct
QLHRGDRQGI

SEQ ID NO: 134046 - protein, 10 aa, synthetic construct
QLSRGDRQGI

SEQ ID NO: 134047 - protein, 10 aa, synthetic construct
QLTRGDRQGI

SEQ ID NO: 134048 - protein, 10 aa, synthetic construct
QLYRGDRQGI

SEQ ID NO: 134049 - protein, 10 aa, synthetic construct
QLNRGDRQGI

SEQ ID NO: 134050 - protein, 10 aa, synthetic construct
QLQRGDRQGI

SEQ ID NO: 134051 - protein, 10 aa, synthetic construct
QLDRGDRQGI

SEQ ID NO: 134052 - protein, 10 aa, synthetic construct
QLERGDRQGI

SEQ ID NO: 134053 - protein, 10 aa, synthetic construct
QIGRGDRQGI

SEQ ID NO: 134054 - protein, 10 aa, synthetic construct
QIARGDRQGI

SEQ ID NO: 134055 - protein, 10 aa, synthetic construct
QIVRGDRQGI

SEQ ID NO: 134056 - protein, 10 aa, synthetic construct
QIPRGDRQGI

SEQ ID NO: 134057 - protein, 10 aa, synthetic construct
QILRGDRQGI

SEQ ID NO: 134058 - protein, 10 aa, synthetic construct
QIIRGDRQGI

SEQ ID NO: 134059 - protein, 10 aa, synthetic construct
QIMRGDRQGI

SEQ ID NO: 134060 - protein, 10 aa, synthetic construct
QIWRGDRQGI

SEQ ID NO: 134061 - protein, 10 aa, synthetic construct
QIFRGDRQGI

SEQ ID NO: 134062 - protein, 10 aa, synthetic construct
QIKRGDRQGI

SEQ ID NO: 134063 - protein, 10 aa, synthetic construct
QIRRGDRQGI

SEQ ID NO: 134064 - protein, 10 aa, synthetic construct
QIHRGDRQGI

SEQ ID NO: 134065 - protein, 10 aa, synthetic construct
QISRGDRQGI

SEQ ID NO: 134066 - protein, 10 aa, synthetic construct
QITRGDRQGI

SEQ ID NO: 134067 - protein, 10 aa, synthetic construct
QIYRGDRQGI

SEQ ID NO: 134068 - protein, 10 aa, synthetic construct
QINRGDRQGI

SEQ ID NO: 134069 - protein, 10 aa, synthetic construct
QIQRGDRQGI

SEQ ID NO: 134070 - protein, 10 aa, synthetic construct
QIDRGDRQGI

SEQ ID NO: 134071 - protein, 10 aa, synthetic construct
QIERGDRQGI

SEQ ID NO: 134072 - protein, 10 aa, synthetic construct
QMGRGDRQGI

SEQ ID NO: 134073 - protein, 10 aa, synthetic construct
QMARGDRQGI

SEQ ID NO: 134074 - protein, 10 aa, synthetic construct
QMVRGDRQGI

SEQ ID NO: 134075 - protein, 10 aa, synthetic construct
QMPRGDRQGI

SEQ ID NO: 134076 - protein, 10 aa, synthetic construct
QMLRGDRQGI

SEQ ID NO: 134077 - protein, 10 aa, synthetic construct
QMIRGDRQGI

SEQ ID NO: 134078 - protein, 10 aa, synthetic construct
QMMRGDRQGI

SEQ ID NO: 134079 - protein, 10 aa, synthetic construct
QMWRGDRQGI

SEQ ID NO: 134080 - protein, 10 aa, synthetic construct
QMFRGDRQGI

SEQ ID NO: 134081 - protein, 10 aa, synthetic construct
QMKRGDRQGI

SEQ ID NO: 134082 - protein, 10 aa, synthetic construct
QMRRGDRQGI

SEQ ID NO: 134083 - protein, 10 aa, synthetic construct
QMHRGDRQGI

SEQ ID NO: 134084 - protein, 10 aa, synthetic construct
QMSRGDRQGI

SEQ ID NO: 134085 - protein, 10 aa, synthetic construct
QMTRGDRQGI

SEQ ID NO: 134086 - protein, 10 aa, synthetic construct
QMYRGDRQGI

SEQ ID NO: 134087 - protein, 10 aa, synthetic construct
QMNRGDRQGI

SEQ ID NO: 134088 - protein, 10 aa, synthetic construct
QMQRGDRQGI

SEQ ID NO: 134089 - protein, 10 aa, synthetic construct
QMDRGDRQGI

SEQ ID NO: 134090 - protein, 10 aa, synthetic construct
QMERGDRQGI

SEQ ID NO: 134091 - protein, 10 aa, synthetic construct
QWGRGDRQGI

SEQ ID NO: 134092 - protein, 10 aa, synthetic construct
QWARGDRQGI

SEQ ID NO: 134093 - protein, 10 aa, synthetic construct
QWVRGDRQGI

SEQ ID NO: 134094 - protein, 10 aa, synthetic construct
QWPRGDRQGI

SEQ ID NO: 134095 - protein, 10 aa, synthetic construct
QWLRGDRQGI

SEQ ID NO: 134096 - protein, 10 aa, synthetic construct
QWIRGDRQGI

SEQ ID NO: 134097 - protein, 10 aa, synthetic construct
QWMRGDRQGI

SEQ ID NO: 134098 - protein, 10 aa, synthetic construct
QWWRGDRQGI

SEQ ID NO: 134099 - protein, 10 aa, synthetic construct
QWFRGDRQGI

SEQ ID NO: 134100 - protein, 10 aa, synthetic construct
QWKRGDRQGI

SEQ ID NO: 134101 - protein, 10 aa, synthetic construct
QWRRGDRQGI

SEQ ID NO: 134102 - protein, 10 aa, synthetic construct
QWHRGDRQGI

SEQ ID NO: 134103 - protein, 10 aa, synthetic construct
QWSRGDRQGI

SEQ ID NO: 134104 - protein, 10 aa, synthetic construct
QWTRGDRQGI

SEQ ID NO: 134105 - protein, 10 aa, synthetic construct
QWYRGDRQGI

SEQ ID NO: 134106 - protein, 10 aa, synthetic construct
QWNRGDRQGI

SEQ ID NO: 134107 - protein, 10 aa, synthetic construct
QWQRGDRQGI

SEQ ID NO: 134108 - protein, 10 aa, synthetic construct
QWDRGDRQGI

SEQ ID NO: 134109 - protein, 10 aa, synthetic construct
QWERGDRQGI

SEQ ID NO: 134110 - protein, 10 aa, synthetic construct
QFGRGDRQGI

SEQ ID NO: 134111 - protein, 10 aa, synthetic construct
QFARGDRQGI

SEQ ID NO: 134112 - protein, 10 aa, synthetic construct
QFVRGDRQGI

SEQ ID NO: 134113 - protein, 10 aa, synthetic construct
QFPRGDRQGI

SEQ ID NO: 134114 - protein, 10 aa, synthetic construct
QFLRGDRQGI

SEQ ID NO: 134115 - protein, 10 aa, synthetic construct
QFIRGDRQGI

SEQ ID NO: 134116 - protein, 10 aa, synthetic construct
QFMRGDRQGI

SEQ ID NO: 134117 - protein, 10 aa, synthetic construct
QFWRGDRQGI

SEQ ID NO: 134118 - protein, 10 aa, synthetic construct
QFFRGDRQGI

SEQ ID NO: 134119 - protein, 10 aa, synthetic construct
QFKRGDRQGI

SEQ ID NO: 134120 - protein, 10 aa, synthetic construct
QFRRGDRQGI

SEQ ID NO: 134121 - protein, 10 aa, synthetic construct
QFHRGDRQGI

SEQ ID NO: 134122 - protein, 10 aa, synthetic construct
QFSRGDRQGI

SEQ ID NO: 134123 - protein, 10 aa, synthetic construct
QFTRGDRQGI

SEQ ID NO: 134124 - protein, 10 aa, synthetic construct
QFYRGDRQGI

SEQ ID NO: 134125 - protein, 10 aa, synthetic construct
QFNRGDRQGI

SEQ ID NO: 134126 - protein, 10 aa, synthetic construct
QFQRGDRQGI

SEQ ID NO: 134127 - protein, 10 aa, synthetic construct
QFDRGDRQGI

SEQ ID NO: 134128 - protein, 10 aa, synthetic construct
QFERGDRQGI

SEQ ID NO: 134129 - protein, 10 aa, synthetic construct
QKGRGDRQGI

SEQ ID NO: 134130 - protein, 10 aa, synthetic construct
QKARGDRQGI

SEQ ID NO: 134131 - protein, 10 aa, synthetic construct
QKVRGDRQGI

SEQ ID NO: 134132 - protein, 10 aa, synthetic construct
QKPRGDRQGI

SEQ ID NO: 134133 - protein, 10 aa, synthetic construct
QKLRGDRQGI

SEQ ID NO: 134134 - protein, 10 aa, synthetic construct
QKIRGDRQGI

SEQ ID NO: 134135 - protein, 10 aa, synthetic construct
QKMRGDRQGI

SEQ ID NO: 134136 - protein, 10 aa, synthetic construct
QKWRGDRQGI

SEQ ID NO: 134137 - protein, 10 aa, synthetic construct
QKFRGDRQGI

SEQ ID NO: 134138 - protein, 10 aa, synthetic construct
QKKRGDRQGI

SEQ ID NO: 134139 - protein, 10 aa, synthetic construct
QKRRGDRQGI

SEQ ID NO: 134140 - protein, 10 aa, synthetic construct
QKHRGDRQGI

SEQ ID NO: 134141 - protein, 10 aa, synthetic construct
QKSRGDRQGI

SEQ ID NO: 134142 - protein, 10 aa, synthetic construct
QKTRGDRQGI

SEQ ID NO: 134143 - protein, 10 aa, synthetic construct
QKYRGDRQGI

SEQ ID NO: 134144 - protein, 10 aa, synthetic construct
QKNRGDRQGI

SEQ ID NO: 134145 - protein, 10 aa, synthetic construct
QKQRGDRQGI

SEQ ID NO: 134146 - protein, 10 aa, synthetic construct
QKDRGDRQGI

SEQ ID NO: 134147 - protein, 10 aa, synthetic construct
QKERGDRQGI

SEQ ID NO: 134148 - protein, 10 aa, synthetic construct
QRGRGDRQGI

SEQ ID NO: 134149 - protein, 10 aa, synthetic construct
QRARGDRQGI

SEQ ID NO: 134150 - protein, 10 aa, synthetic construct
QRVRGDRQGI

SEQ ID NO: 134151 - protein, 10 aa, synthetic construct
QRPRGDRQGI

SEQ ID NO: 134152 - protein, 10 aa, synthetic construct
QRLRGDRQGI

SEQ ID NO: 134153 - protein, 10 aa, synthetic construct
QRIRGDRQGI

SEQ ID NO: 134154 - protein, 10 aa, synthetic construct
QRMRGDRQGI

SEQ ID NO: 134155 - protein, 10 aa, synthetic construct
QRWRGDRQGI

SEQ ID NO: 134156 - protein, 10 aa, synthetic construct
QRFRGDRQGI

SEQ ID NO: 134157 - protein, 10 aa, synthetic construct
QRKRGDRQGI

SEQ ID NO: 134158 - protein, 10 aa, synthetic construct
QRRRGDRQGI

SEQ ID NO: 134159 - protein, 10 aa, synthetic construct
QRHRGDRQGI

SEQ ID NO: 134160 - protein, 10 aa, synthetic construct
QRSRGDRQGI

SEQ ID NO: 134161 - protein, 10 aa, synthetic construct
QRTRGDRQGI

SEQ ID NO: 134162 - protein, 10 aa, synthetic construct
QRYRGDRQGI

SEQ ID NO: 134163 - protein, 10 aa, synthetic construct
QRNRGDRQGI

SEQ ID NO: 134164 - protein, 10 aa, synthetic construct
QRQRGDRQGI

SEQ ID NO: 134165 - protein, 10 aa, synthetic construct
QRDRGDRQGI

SEQ ID NO: 134166 - protein, 10 aa, synthetic construct
QRERGDRQGI

SEQ ID NO: 134167 - protein, 10 aa, synthetic construct
QHGRGDRQGI

SEQ ID NO: 134168 - protein, 10 aa, synthetic construct
QHARGDRQGI

SEQ ID NO: 134169 - protein, 10 aa, synthetic construct
QHVRGDRQGI

SEQ ID NO: 134170 - protein, 10 aa, synthetic construct
QHPRGDRQGI

SEQ ID NO: 134171 - protein, 10 aa, synthetic construct
QHLRGDRQGI

SEQ ID NO: 134172 - protein, 10 aa, synthetic construct
QHIRGDRQGI

SEQ ID NO: 134173 - protein, 10 aa, synthetic construct
QHMRGDRQGI

SEQ ID NO: 134174 - protein, 10 aa, synthetic construct
QHWRGDRQGI

SEQ ID NO: 134175 - protein, 10 aa, synthetic construct
QHFRGDRQGI

SEQ ID NO: 134176 - protein, 10 aa, synthetic construct
QHKRGDRQGI

SEQ ID NO: 134177 - protein, 10 aa, synthetic construct
QHRRGDRQGI

SEQ ID NO: 134178 - protein, 10 aa, synthetic construct
QHHRGDRQGI

SEQ ID NO: 134179 - protein, 10 aa, synthetic construct
QHSRGDRQGI

SEQ ID NO: 134180 - protein, 10 aa, synthetic construct
QHTRGDRQGI

SEQ ID NO: 134181 - protein, 10 aa, synthetic construct
QHYRGDRQGI

SEQ ID NO: 134182 - protein, 10 aa, synthetic construct
QHNRGDRQGI

SEQ ID NO: 134183 - protein, 10 aa, synthetic construct
QHQRGDRQGI

SEQ ID NO: 134184 - protein, 10 aa, synthetic construct
QHDRGDRQGI

SEQ ID NO: 134185 - protein, 10 aa, synthetic construct
QHERGDRQGI

SEQ ID NO: 134186 - protein, 10 aa, synthetic construct
QSGRGDRQGI

SEQ ID NO: 134187 - protein, 10 aa, synthetic construct
QSARGDRQGI

SEQ ID NO: 134188 - protein, 10 aa, synthetic construct
QSVRGDRQGI

SEQ ID NO: 134189 - protein, 10 aa, synthetic construct
QSPRGDRQGI

SEQ ID NO: 134190 - protein, 10 aa, synthetic construct
QSLRGDRQGI

SEQ ID NO: 134191 - protein, 10 aa, synthetic construct
QSIRGDRQGI

SEQ ID NO: 134192 - protein, 10 aa, synthetic construct
QSMRGDRQGI

SEQ ID NO: 134193 - protein, 10 aa, synthetic construct
QSWRGDRQGI

SEQ ID NO: 134194 - protein, 10 aa, synthetic construct
QSFRGDRQGI

SEQ ID NO: 134195 - protein, 10 aa, synthetic construct
QSKRGDRQGI

SEQ ID NO: 134196 - protein, 10 aa, synthetic construct
QSRRGDRQGI

SEQ ID NO: 134197 - protein, 10 aa, synthetic construct
QSHRGDRQGI

SEQ ID NO: 134198 - protein, 10 aa, synthetic construct
QSSRGDRQGI

SEQ ID NO: 134199 - protein, 10 aa, synthetic construct
QSTRGDRQGI

SEQ ID NO: 134200 - protein, 10 aa, synthetic construct
QSYRGDRQGI

SEQ ID NO: 134201 - protein, 10 aa, synthetic construct
QSNRGDRQGI

SEQ ID NO: 134202 - protein, 10 aa, synthetic construct
QSQRGDRQGI

SEQ ID NO: 134203 - protein, 10 aa, synthetic construct
QSDRGDRQGI

SEQ ID NO: 134204 - protein, 10 aa, synthetic construct
QSERGDRQGI

SEQ ID NO: 134205 - protein, 10 aa, synthetic construct
QTGRGDRQGI

SEQ ID NO: 134206 - protein, 10 aa, synthetic construct
QTARGDRQGI

SEQ ID NO: 134207 - protein, 10 aa, synthetic construct
QTVRGDRQGI

SEQ ID NO: 134208 - protein, 10 aa, synthetic construct
QTPRGDRQGI

SEQ ID NO: 134209 - protein, 10 aa, synthetic construct
QTLRGDRQGI

SEQ ID NO: 134210 - protein, 10 aa, synthetic construct
QTIRGDRQGI

SEQ ID NO: 134211 - protein, 10 aa, synthetic construct
QTMRGDRQGI

SEQ ID NO: 134212 - protein, 10 aa, synthetic construct
QTWRGDRQGI

SEQ ID NO: 134213 - protein, 10 aa, synthetic construct
QTFRGDRQGI

SEQ ID NO: 134214 - protein, 10 aa, synthetic construct
QTKRGDRQGI

SEQ ID NO: 134215 - protein, 10 aa, synthetic construct
QTRRGDRQGI

SEQ ID NO: 134216 - protein, 10 aa, synthetic construct
QTHRGDRQGI

SEQ ID NO: 134217 - protein, 10 aa, synthetic construct
QTSRGDRQGI

SEQ ID NO: 134218 - protein, 10 aa, synthetic construct
QTTRGDRQGI

SEQ ID NO: 134219 - protein, 10 aa, synthetic construct
QTYRGDRQGI

SEQ ID NO: 134220 - protein, 10 aa, synthetic construct
QTNRGDRQGI

SEQ ID NO: 134221 - protein, 10 aa, synthetic construct
QTQRGDRQGI

SEQ ID NO: 134222 - protein, 10 aa, synthetic construct
QTDRGDRQGI

SEQ ID NO: 134223 - protein, 10 aa, synthetic construct
QTERGDRQGI

SEQ ID NO: 134224 - protein, 10 aa, synthetic construct
QYGRGDRQGI

SEQ ID NO: 134225 - protein, 10 aa, synthetic construct
QYARGDRQGI

SEQ ID NO: 134226 - protein, 10 aa, synthetic construct
QYVRGDRQGI

SEQ ID NO: 134227 - protein, 10 aa, synthetic construct
QYPRGDRQGI

SEQ ID NO: 134228 - protein, 10 aa, synthetic construct
QYLRGDRQGI

SEQ ID NO: 134229 - protein, 10 aa, synthetic construct
QYIRGDRQGI

SEQ ID NO: 134230 - protein, 10 aa, synthetic construct
QYMRGDRQGI

SEQ ID NO: 134231 - protein, 10 aa, synthetic construct
QYWRGDRQGI

SEQ ID NO: 134232 - protein, 10 aa, synthetic construct
QYFRGDRQGI

SEQ ID NO: 134233 - protein, 10 aa, synthetic construct
QYKRGDRQGI

SEQ ID NO: 134234 - protein, 10 aa, synthetic construct
QYRRGDRQGI

SEQ ID NO: 134235 - protein, 10 aa, synthetic construct
QYHRGDRQGI

SEQ ID NO: 134236 - protein, 10 aa, synthetic construct
QYSRGDRQGI

SEQ ID NO: 134237 - protein, 10 aa, synthetic construct
QYTRGDRQGI

SEQ ID NO: 134238 - protein, 10 aa, synthetic construct
QYYRGDRQGI

SEQ ID NO: 134239 - protein, 10 aa, synthetic construct
QYNRGDRQGI

SEQ ID NO: 134240 - protein, 10 aa, synthetic construct
QYQRGDRQGI

SEQ ID NO: 134241 - protein, 10 aa, synthetic construct
QYDRGDRQGI

SEQ ID NO: 134242 - protein, 10 aa, synthetic construct
QYERGDRQGI

SEQ ID NO: 134243 - protein, 10 aa, synthetic construct
QNGRGDRQGI

SEQ ID NO: 134244 - protein, 10 aa, synthetic construct
QNARGDRQGI

SEQ ID NO: 134245 - protein, 10 aa, synthetic construct
QNVRGDRQGI

SEQ ID NO: 134246 - protein, 10 aa, synthetic construct
QNPRGDRQGI

SEQ ID NO: 134247 - protein, 10 aa, synthetic construct
QNLRGDRQGI

SEQ ID NO: 134248 - protein, 10 aa, synthetic construct
QNIRGDRQGI

SEQ ID NO: 134249 - protein, 10 aa, synthetic construct
QNMRGDRQGI

SEQ ID NO: 134250 - protein, 10 aa, synthetic construct
QNWRGDRQGI

SEQ ID NO: 134251 - protein, 10 aa, synthetic construct
QNFRGDRQGI

SEQ ID NO: 134252 - protein, 10 aa, synthetic construct
QNKRGDRQGI

SEQ ID NO: 134253 - protein, 10 aa, synthetic construct
QNRRGDRQGI

SEQ ID NO: 134254 - protein, 10 aa, synthetic construct
QNHRGDRQGI

SEQ ID NO: 134255 - protein, 10 aa, synthetic construct
QNSRGDRQGI

SEQ ID NO: 134256 - protein, 10 aa, synthetic construct
QNTRGDRQGI

SEQ ID NO: 134257 - protein, 10 aa, synthetic construct
QNYRGDRQGI

SEQ ID NO: 134258 - protein, 10 aa, synthetic construct
QNNRGDRQGI

SEQ ID NO: 134259 - protein, 10 aa, synthetic construct
QNQRGDRQGI

SEQ ID NO: 134260 - protein, 10 aa, synthetic construct
QNDRGDRQGI

SEQ ID NO: 134261 - protein, 10 aa, synthetic construct
QNERGDRQGI

SEQ ID NO: 134262 - protein, 10 aa, synthetic construct
QQGRGDRQGI

SEQ ID NO: 134263 - protein, 10 aa, synthetic construct
QQARGDRQGI

SEQ ID NO: 134264 - protein, 10 aa, synthetic construct
QQVRGDRQGI

SEQ ID NO: 134265 - protein, 10 aa, synthetic construct
QQPRGDRQGI

SEQ ID NO: 134266 - protein, 10 aa, synthetic construct
QQLRGDRQGI

SEQ ID NO: 134267 - protein, 10 aa, synthetic construct
QQIRGDRQGI

SEQ ID NO: 134268 - protein, 10 aa, synthetic construct
QQMRGDRQGI

SEQ ID NO: 134269 - protein, 10 aa, synthetic construct
QQWRGDRQGI

SEQ ID NO: 134270 - protein, 10 aa, synthetic construct
QQFRGDRQGI

SEQ ID NO: 134271 - protein, 10 aa, synthetic construct
QQKRGDRQGI

SEQ ID NO: 134272 - protein, 10 aa, synthetic construct
QQRRGDRQGI

SEQ ID NO: 134273 - protein, 10 aa, synthetic construct
QQHRGDRQGI

SEQ ID NO: 134274 - protein, 10 aa, synthetic construct
QQSRGDRQGI

SEQ ID NO: 134275 - protein, 10 aa, synthetic construct
QQTRGDRQGI

SEQ ID NO: 134276 - protein, 10 aa, synthetic construct
QQYRGDRQGI

SEQ ID NO: 134277 - protein, 10 aa, synthetic construct
QQNRGDRQGI

SEQ ID NO: 134278 - protein, 10 aa, synthetic construct
QQQRGDRQGI

SEQ ID NO: 134279 - protein, 10 aa, synthetic construct
QQDRGDRQGI

SEQ ID NO: 134280 - protein, 10 aa, synthetic construct
QQERGDRQGI

SEQ ID NO: 134281 - protein, 10 aa, synthetic construct
QDGRGDRQGI

SEQ ID NO: 134282 - protein, 10 aa, synthetic construct
QDARGDRQGI

SEQ ID NO: 134283 - protein, 10 aa, synthetic construct
QDVRGDRQGI

SEQ ID NO: 134284 - protein, 10 aa, synthetic construct
QDPRGDRQGI

SEQ ID NO: 134285 - protein, 10 aa, synthetic construct
QDLRGDRQGI

SEQ ID NO: 134286 - protein, 10 aa, synthetic construct
QDIRGDRQGI

SEQ ID NO: 134287 - protein, 10 aa, synthetic construct
QDMRGDRQGI

SEQ ID NO: 134288 - protein, 10 aa, synthetic construct
QDWRGDRQGI

SEQ ID NO: 134289 - protein, 10 aa, synthetic construct
QDFRGDRQGI

SEQ ID NO: 134290 - protein, 10 aa, synthetic construct
QDKRGDRQGI

SEQ ID NO: 134291 - protein, 10 aa, synthetic construct
QDRRGDRQGI

SEQ ID NO: 134292 - protein, 10 aa, synthetic construct
QDHRGDRQGI

SEQ ID NO: 134293 - protein, 10 aa, synthetic construct
QDSRGDRQGI

SEQ ID NO: 134294 - protein, 10 aa, synthetic construct
QDTRGDRQGI

SEQ ID NO: 134295 - protein, 10 aa, synthetic construct
QDYRGDRQGI

SEQ ID NO: 134296 - protein, 10 aa, synthetic construct
QDNRGDRQGI

SEQ ID NO: 134297 - protein, 10 aa, synthetic construct
QDQRGDRQGI

SEQ ID NO: 134298 - protein, 10 aa, synthetic construct
QDDRGDRQGI

SEQ ID NO: 134299 - protein, 10 aa, synthetic construct
QDERGDRQGI

SEQ ID NO: 134300 - protein, 10 aa, synthetic construct
QEGRGDRQGI

SEQ ID NO: 134301 - protein, 10 aa, synthetic construct
QEARGDRQGI

SEQ ID NO: 134302 - protein, 10 aa, synthetic construct
QEVRGDRQGI

SEQ ID NO: 134303 - protein, 10 aa, synthetic construct
QEPRGDRQGI

SEQ ID NO: 134304 - protein, 10 aa, synthetic construct
QELRGDRQGI

SEQ ID NO: 134305 - protein, 10 aa, synthetic construct
QEIRGDRQGI

SEQ ID NO: 134306 - protein, 10 aa, synthetic construct
QEMRGDRQGI

SEQ ID NO: 134307 - protein, 10 aa, synthetic construct
QEWRGDRQGI

SEQ ID NO: 134308 - protein, 10 aa, synthetic construct
QEFRGDRQGI

SEQ ID NO: 134309 - protein, 10 aa, synthetic construct
QEKRGDRQGI

SEQ ID NO: 134310 - protein, 10 aa, synthetic construct
QERRGDRQGI

SEQ ID NO: 134311 - protein, 10 aa, synthetic construct
QEHRGDRQGI

SEQ ID NO: 134312 - protein, 10 aa, synthetic construct
QESRGDRQGI

SEQ ID NO: 134313 - protein, 10 aa, synthetic construct
QETRGDRQGI

SEQ ID NO: 134314 - protein, 10 aa, synthetic construct
QEYRGDRQGI

SEQ ID NO: 134315 - protein, 10 aa, synthetic construct
QENRGDRQGI

SEQ ID NO: 134316 - protein, 10 aa, synthetic construct
QEQRGDRQGI

SEQ ID NO: 134317 - protein, 10 aa, synthetic construct
QEDRGDRQGI

SEQ ID NO: 134318 - protein, 10 aa, synthetic construct
QEERGDRQGI

SEQ ID NO: 134319 - protein, 10 aa, synthetic construct
SGGRGDRSQT

SEQ ID NO: 134320 - protein, 10 aa, synthetic construct
SGARGDRSQT

SEQ ID NO: 134321 - protein, 10 aa, synthetic construct
SGVRGDRSQT

SEQ ID NO: 134322 - protein, 10 aa, synthetic construct
SGPRGDRSQT

SEQ ID NO: 134323 - protein, 10 aa, synthetic construct
SGLRGDRSQT

SEQ ID NO: 134324 - protein, 10 aa, synthetic construct
SGIRGDRSQT

SEQ ID NO: 134325 - protein, 10 aa, synthetic construct
SGMRGDRSQT

SEQ ID NO: 134326 - protein, 10 aa, synthetic construct
SGWRGDRSQT

SEQ ID NO: 134327 - protein, 10 aa, synthetic construct
SGFRGDRSQT

SEQ ID NO: 134328 - protein, 10 aa, synthetic construct
SGKRGDRSQT

SEQ ID NO: 134329 - protein, 10 aa, synthetic construct
SGRRGDRSQT

SEQ ID NO: 134330 - protein, 10 aa, synthetic construct
SGHRGDRSQT

SEQ ID NO: 134331 - protein, 10 aa, synthetic construct
SGSRGDRSQT

SEQ ID NO: 134332 - protein, 10 aa, synthetic construct
SGTRGDRSQT

SEQ ID NO: 134333 - protein, 10 aa, synthetic construct
SGYRGDRSQT

SEQ ID NO: 134334 - protein, 10 aa, synthetic construct
SGNRGDRSQT

SEQ ID NO: 134335 - protein, 10 aa, synthetic construct
SGQRGDRSQT

SEQ ID NO: 134336 - protein, 10 aa, synthetic construct
SGDRGDRSQT

SEQ ID NO: 134337 - protein, 10 aa, synthetic construct
SGERGDRSQT

SEQ ID NO: 134338 - protein, 10 aa, synthetic construct
SAGRGDRSQT

SEQ ID NO: 134339 - protein, 10 aa, synthetic construct
SAARGDRSQT

SEQ ID NO: 134340 - protein, 10 aa, synthetic construct
SAVRGDRSQT

SEQ ID NO: 134341 - protein, 10 aa, synthetic construct
SAPRGDRSQT

SEQ ID NO: 134342 - protein, 10 aa, synthetic construct
SALRGDRSQT

SEQ ID NO: 134343 - protein, 10 aa, synthetic construct
SAIRGDRSQT

SEQ ID NO: 134344 - protein, 10 aa, synthetic construct
SAMRGDRSQT

SEQ ID NO: 134345 - protein, 10 aa, synthetic construct
SAWRGDRSQT

SEQ ID NO: 134346 - protein, 10 aa, synthetic construct
SAFRGDRSQT

SEQ ID NO: 134347 - protein, 10 aa, synthetic construct
SAKRGDRSQT

SEQ ID NO: 134348 - protein, 10 aa, synthetic construct
SARRGDRSQT

SEQ ID NO: 134349 - protein, 10 aa, synthetic construct
SAHRGDRSQT

SEQ ID NO: 134350 - protein, 10 aa, synthetic construct
SASRGDRSQT

SEQ ID NO: 134351 - protein, 10 aa, synthetic construct
SATRGDRSQT

SEQ ID NO: 134352 - protein, 10 aa, synthetic construct
SAYRGDRSQT

SEQ ID NO: 134353 - protein, 10 aa, synthetic construct
SANRGDRSQT

SEQ ID NO: 134354 - protein, 10 aa, synthetic construct
SAQRGDRSQT

SEQ ID NO: 134355 - protein, 10 aa, synthetic construct
SADRGDRSQT

SEQ ID NO: 134356 - protein, 10 aa, synthetic construct
SAERGDRSQT

SEQ ID NO: 134357 - protein, 10 aa, synthetic construct
SVGRGDRSQT

SEQ ID NO: 134358 - protein, 10 aa, synthetic construct
SVARGDRSQT

SEQ ID NO: 134359 - protein, 10 aa, synthetic construct
SVVRGDRSQT

SEQ ID NO: 134360 - protein, 10 aa, synthetic construct
SVPRGDRSQT

SEQ ID NO: 134361 - protein, 10 aa, synthetic construct
SVLRGDRSQT

SEQ ID NO: 134362 - protein, 10 aa, synthetic construct
SVIRGDRSQT

SEQ ID NO: 134363 - protein, 10 aa, synthetic construct
SVMRGDRSQT

SEQ ID NO: 134364 - protein, 10 aa, synthetic construct
SVWRGDRSQT

SEQ ID NO: 134365 - protein, 10 aa, synthetic construct
SVFRGDRSQT

SEQ ID NO: 134366 - protein, 10 aa, synthetic construct
SVKRGDRSQT

SEQ ID NO: 134367 - protein, 10 aa, synthetic construct
SVRRGDRSQT

SEQ ID NO: 134368 - protein, 10 aa, synthetic construct
SVHRGDRSQT

SEQ ID NO: 134369 - protein, 10 aa, synthetic construct
SVSRGDRSQT

SEQ ID NO: 134370 - protein, 10 aa, synthetic construct
SVTRGDRSQT

SEQ ID NO: 134371 - protein, 10 aa, synthetic construct
SVYRGDRSQT

SEQ ID NO: 134372 - protein, 10 aa, synthetic construct
SVNRGDRSQT

SEQ ID NO: 134373 - protein, 10 aa, synthetic construct
SVQRGDRSQT

SEQ ID NO: 134374 - protein, 10 aa, synthetic construct
SVDRGDRSQT

SEQ ID NO: 134375 - protein, 10 aa, synthetic construct
SVERGDRSQT

SEQ ID NO: 134376 - protein, 10 aa, synthetic construct
SPGRGDRSQT

SEQ ID NO: 134377 - protein, 10 aa, synthetic construct
SPARGDRSQT

SEQ ID NO: 134378 - protein, 10 aa, synthetic construct
SPVRGDRSQT

SEQ ID NO: 134379 - protein, 10 aa, synthetic construct
SPPRGDRSQT

SEQ ID NO: 134380 - protein, 10 aa, synthetic construct
SPLRGDRSQT

SEQ ID NO: 134381 - protein, 10 aa, synthetic construct
SPIRGDRSQT

SEQ ID NO: 134382 - protein, 10 aa, synthetic construct
SPMRGDRSQT

SEQ ID NO: 134383 - protein, 10 aa, synthetic construct
SPWRGDRSQT

SEQ ID NO: 134384 - protein, 10 aa, synthetic construct
SPFRGDRSQT

SEQ ID NO: 134385 - protein, 10 aa, synthetic construct
SPKRGDRSQT

SEQ ID NO: 134386 - protein, 10 aa, synthetic construct
SPRRGDRSQT

SEQ ID NO: 134387 - protein, 10 aa, synthetic construct
SPHRGDRSQT

SEQ ID NO: 134388 - protein, 10 aa, synthetic construct
SPSRGDRSQT

SEQ ID NO: 134389 - protein, 10 aa, synthetic construct
SPTRGDRSQT

SEQ ID NO: 134390 - protein, 10 aa, synthetic construct
SPYRGDRSQT

SEQ ID NO: 134391 - protein, 10 aa, synthetic construct
SPNRGDRSQT

SEQ ID NO: 134392 - protein, 10 aa, synthetic construct
SPQRGDRSQT

SEQ ID NO: 134393 - protein, 10 aa, synthetic construct
SPDRGDRSQT

SEQ ID NO: 134394 - protein, 10 aa, synthetic construct
SPERGDRSQT

SEQ ID NO: 134395 - protein, 10 aa, synthetic construct
SLGRGDRSQT

SEQ ID NO: 134396 - protein, 10 aa, synthetic construct
SLARGDRSQT

SEQ ID NO: 134397 - protein, 10 aa, synthetic construct
SLVRGDRSQT

SEQ ID NO: 134398 - protein, 10 aa, synthetic construct
SLPRGDRSQT

SEQ ID NO: 134399 - protein, 10 aa, synthetic construct
SLLRGDRSQT

SEQ ID NO: 134400 - protein, 10 aa, synthetic construct
SLIRGDRSQT

SEQ ID NO: 134401 - protein, 10 aa, synthetic construct
SLMRGDRSQT

SEQ ID NO: 134402 - protein, 10 aa, synthetic construct
SLWRGDRSQT

SEQ ID NO: 134403 - protein, 10 aa, synthetic construct
SLFRGDRSQT

SEQ ID NO: 134404 - protein, 10 aa, synthetic construct
SLKRGDRSQT

SEQ ID NO: 134405 - protein, 10 aa, synthetic construct
SLRRGDRSQT

SEQ ID NO: 134406 - protein, 10 aa, synthetic construct
SLHRGDRSQT

SEQ ID NO: 134407 - protein, 10 aa, synthetic construct
SLSRGDRSQT

SEQ ID NO: 134408 - protein, 10 aa, synthetic construct
SLTRGDRSQT

SEQ ID NO: 134409 - protein, 10 aa, synthetic construct
SLYRGDRSQT

SEQ ID NO: 134410 - protein, 10 aa, synthetic construct
SLNRGDRSQT

SEQ ID NO: 134411 - protein, 10 aa, synthetic construct
SLQRGDRSQT

SEQ ID NO: 134412 - protein, 10 aa, synthetic construct
SLDRGDRSQT

SEQ ID NO: 134413 - protein, 10 aa, synthetic construct
SLERGDRSQT

SEQ ID NO: 134414 - protein, 10 aa, synthetic construct
SIGRGDRSQT

SEQ ID NO: 134415 - protein, 10 aa, synthetic construct
SIARGDRSQT

SEQ ID NO: 134416 - protein, 10 aa, synthetic construct
SIVRGDRSQT

SEQ ID NO: 134417 - protein, 10 aa, synthetic construct
SIPRGDRSQT

SEQ ID NO: 134418 - protein, 10 aa, synthetic construct
SILRGDRSQT

SEQ ID NO: 134419 - protein, 10 aa, synthetic construct
SIIRGDRSQT

SEQ ID NO: 134420 - protein, 10 aa, synthetic construct
SIMRGDRSQT

SEQ ID NO: 134421 - protein, 10 aa, synthetic construct
SIWRGDRSQT

SEQ ID NO: 134422 - protein, 10 aa, synthetic construct
SIFRGDRSQT

SEQ ID NO: 134423 - protein, 10 aa, synthetic construct
SIKRGDRSQT

SEQ ID NO: 134424 - protein, 10 aa, synthetic construct
SIRRGDRSQT

SEQ ID NO: 134425 - protein, 10 aa, synthetic construct
SIHRGDRSQT

SEQ ID NO: 134426 - protein, 10 aa, synthetic construct
SISRGDRSQT

SEQ ID NO: 134427 - protein, 10 aa, synthetic construct
SITRGDRSQT

SEQ ID NO: 134428 - protein, 10 aa, synthetic construct
SIYRGDRSQT

SEQ ID NO: 134429 - protein, 10 aa, synthetic construct
SINRGDRSQT

SEQ ID NO: 134430 - protein, 10 aa, synthetic construct
SIQRGDRSQT

SEQ ID NO: 134431 - protein, 10 aa, synthetic construct
SIDRGDRSQT

SEQ ID NO: 134432 - protein, 10 aa, synthetic construct
SIERGDRSQT

SEQ ID NO: 134433 - protein, 10 aa, synthetic construct
SMGRGDRSQT

SEQ ID NO: 134434 - protein, 10 aa, synthetic construct
SMARGDRSQT

SEQ ID NO: 134435 - protein, 10 aa, synthetic construct
SMVRGDRSQT

SEQ ID NO: 134436 - protein, 10 aa, synthetic construct
SMPRGDRSQT

SEQ ID NO: 134437 - protein, 10 aa, synthetic construct
SMLRGDRSQT

SEQ ID NO: 134438 - protein, 10 aa, synthetic construct
SMIRGDRSQT

SEQ ID NO: 134439 - protein, 10 aa, synthetic construct
SMMRGDRSQT

SEQ ID NO: 134440 - protein, 10 aa, synthetic construct
SMWRGDRSQT

SEQ ID NO: 134441 - protein, 10 aa, synthetic construct
SMFRGDRSQT

SEQ ID NO: 134442 - protein, 10 aa, synthetic construct
SMKRGDRSQT

SEQ ID NO: 134443 - protein, 10 aa, synthetic construct
SMRRGDRSQT

SEQ ID NO: 134444 - protein, 10 aa, synthetic construct
SMHRGDRSQT

SEQ ID NO: 134445 - protein, 10 aa, synthetic construct
SMSRGDRSQT

SEQ ID NO: 134446 - protein, 10 aa, synthetic construct
SMTRGDRSQT

SEQ ID NO: 134447 - protein, 10 aa, synthetic construct
SMYRGDRSQT

SEQ ID NO: 134448 - protein, 10 aa, synthetic construct
SMNRGDRSQT

SEQ ID NO: 134449 - protein, 10 aa, synthetic construct
SMQRGDRSQT

SEQ ID NO: 134450 - protein, 10 aa, synthetic construct
SMDRGDRSQT

SEQ ID NO: 134451 - protein, 10 aa, synthetic construct
SMERGDRSQT

SEQ ID NO: 134452 - protein, 10 aa, synthetic construct
SWGRGDRSQT

SEQ ID NO: 134453 - protein, 10 aa, synthetic construct
SWARGDRSQT

SEQ ID NO: 134454 - protein, 10 aa, synthetic construct
SWVRGDRSQT

SEQ ID NO: 134455 - protein, 10 aa, synthetic construct
SWPRGDRSQT

SEQ ID NO: 134456 - protein, 10 aa, synthetic construct
SWLRGDRSQT

SEQ ID NO: 134457 - protein, 10 aa, synthetic construct
SWIRGDRSQT

SEQ ID NO: 134458 - protein, 10 aa, synthetic construct
SWMRGDRSQT

SEQ ID NO: 134459 - protein, 10 aa, synthetic construct
SWWRGDRSQT

SEQ ID NO: 134460 - protein, 10 aa, synthetic construct
SWFRGDRSQT

SEQ ID NO: 134461 - protein, 10 aa, synthetic construct
SWKRGDRSQT

SEQ ID NO: 134462 - protein, 10 aa, synthetic construct
SWRRGDRSQT

SEQ ID NO: 134463 - protein, 10 aa, synthetic construct
SWHRGDRSQT

SEQ ID NO: 134464 - protein, 10 aa, synthetic construct
SWSRGDRSQT

SEQ ID NO: 134465 - protein, 10 aa, synthetic construct
SWTRGDRSQT

SEQ ID NO: 134466 - protein, 10 aa, synthetic construct
SWYRGDRSQT

SEQ ID NO: 134467 - protein, 10 aa, synthetic construct
SWNRGDRSQT

SEQ ID NO: 134468 - protein, 10 aa, synthetic construct
SWQRGDRSQT

SEQ ID NO: 134469 - protein, 10 aa, synthetic construct
SWDRGDRSQT

SEQ ID NO: 134470 - protein, 10 aa, synthetic construct
SWERGDRSQT

SEQ ID NO: 134471 - protein, 10 aa, synthetic construct
SFGRGDRSQT

SEQ ID NO: 134472 - protein, 10 aa, synthetic construct
SFARGDRSQT

SEQ ID NO: 134473 - protein, 10 aa, synthetic construct
SFVRGDRSQT

SEQ ID NO: 134474 - protein, 10 aa, synthetic construct
SFPRGDRSQT

SEQ ID NO: 134475 - protein, 10 aa, synthetic construct
SFLRGDRSQT

SEQ ID NO: 134476 - protein, 10 aa, synthetic construct
SFIRGDRSQT

SEQ ID NO: 134477 - protein, 10 aa, synthetic construct
SFMRGDRSQT

SEQ ID NO: 134478 - protein, 10 aa, synthetic construct
SFWRGDRSQT

SEQ ID NO: 134479 - protein, 10 aa, synthetic construct
SFFRGDRSQT

SEQ ID NO: 134480 - protein, 10 aa, synthetic construct
SFKRGDRSQT

SEQ ID NO: 134481 - protein, 10 aa, synthetic construct
SFRRGDRSQT

SEQ ID NO: 134482 - protein, 10 aa, synthetic construct
SFHRGDRSQT

SEQ ID NO: 134483 - protein, 10 aa, synthetic construct
SFSRGDRSQT

SEQ ID NO: 134484 - protein, 10 aa, synthetic construct
SFTRGDRSQT

SEQ ID NO: 134485 - protein, 10 aa, synthetic construct
SFYRGDRSQT

SEQ ID NO: 134486 - protein, 10 aa, synthetic construct
SFNRGDRSQT

SEQ ID NO: 134487 - protein, 10 aa, synthetic construct
SFQRGDRSQT

SEQ ID NO: 134488 - protein, 10 aa, synthetic construct
SFDRGDRSQT

SEQ ID NO: 134489 - protein, 10 aa, synthetic construct
SFERGDRSQT

SEQ ID NO: 134490 - protein, 10 aa, synthetic construct
SKGRGDRSQT

SEQ ID NO: 134491 - protein, 10 aa, synthetic construct
SKARGDRSQT

SEQ ID NO: 134492 - protein, 10 aa, synthetic construct
SKVRGDRSQT

SEQ ID NO: 134493 - protein, 10 aa, synthetic construct
SKPRGDRSQT

SEQ ID NO: 134494 - protein, 10 aa, synthetic construct
SKLRGDRSQT

SEQ ID NO: 134495 - protein, 10 aa, synthetic construct
SKIRGDRSQT

SEQ ID NO: 134496 - protein, 10 aa, synthetic construct
SKMRGDRSQT

SEQ ID NO: 134497 - protein, 10 aa, synthetic construct
SKWRGDRSQT

SEQ ID NO: 134498 - protein, 10 aa, synthetic construct
SKFRGDRSQT

SEQ ID NO: 134499 - protein, 10 aa, synthetic construct
SKKRGDRSQT

SEQ ID NO: 134500 - protein, 10 aa, synthetic construct
SKRRGDRSQT

SEQ ID NO: 134501 - protein, 10 aa, synthetic construct
SKHRGDRSQT

SEQ ID NO: 134502 - protein, 10 aa, synthetic construct
SKSRGDRSQT

SEQ ID NO: 134503 - protein, 10 aa, synthetic construct
SKTRGDRSQT

SEQ ID NO: 134504 - protein, 10 aa, synthetic construct
SKYRGDRSQT

SEQ ID NO: 134505 - protein, 10 aa, synthetic construct
SKNRGDRSQT

SEQ ID NO: 134506 - protein, 10 aa, synthetic construct
SKQRGDRSQT

SEQ ID NO: 134507 - protein, 10 aa, synthetic construct
SKDRGDRSQT

SEQ ID NO: 134508 - protein, 10 aa, synthetic construct
SKERGDRSQT

SEQ ID NO: 134509 - protein, 10 aa, synthetic construct
SRGRGDRSQT

SEQ ID NO: 134510 - protein, 10 aa, synthetic construct
SRARGDRSQT

SEQ ID NO: 134511 - protein, 10 aa, synthetic construct
SRVRGDRSQT

SEQ ID NO: 134512 - protein, 10 aa, synthetic construct
SRPRGDRSQT

SEQ ID NO: 134513 - protein, 10 aa, synthetic construct
SRLRGDRSQT

SEQ ID NO: 134514 - protein, 10 aa, synthetic construct
SRIRGDRSQT

SEQ ID NO: 134515 - protein, 10 aa, synthetic construct
SRMRGDRSQT

SEQ ID NO: 134516 - protein, 10 aa, synthetic construct
SRWRGDRSQT

SEQ ID NO: 134517 - protein, 10 aa, synthetic construct
SRFRGDRSQT

SEQ ID NO: 134518 - protein, 10 aa, synthetic construct
SRKRGDRSQT

SEQ ID NO: 134519 - protein, 10 aa, synthetic construct
SRRRGDRSQT

SEQ ID NO: 134520 - protein, 10 aa, synthetic construct
SRHRGDRSQT

SEQ ID NO: 134521 - protein, 10 aa, synthetic construct
SRSRGDRSQT

SEQ ID NO: 134522 - protein, 10 aa, synthetic construct
SRTRGDRSQT

SEQ ID NO: 134523 - protein, 10 aa, synthetic construct
SRYRGDRSQT

SEQ ID NO: 134524 - protein, 10 aa, synthetic construct
SRNRGDRSQT

SEQ ID NO: 134525 - protein, 10 aa, synthetic construct
SRQRGDRSQT

SEQ ID NO: 134526 - protein, 10 aa, synthetic construct
SRDRGDRSQT

SEQ ID NO: 134527 - protein, 10 aa, synthetic construct
SRERGDRSQT

SEQ ID NO: 134528 - protein, 10 aa, synthetic construct
SHGRGDRSQT

SEQ ID NO: 134529 - protein, 10 aa, synthetic construct
SHARGDRSQT

SEQ ID NO: 134530 - protein, 10 aa, synthetic construct
SHVRGDRSQT

SEQ ID NO: 134531 - protein, 10 aa, synthetic construct
SHPRGDRSQT

SEQ ID NO: 134532 - protein, 10 aa, synthetic construct
SHLRGDRSQT

SEQ ID NO: 134533 - protein, 10 aa, synthetic construct
SHIRGDRSQT

SEQ ID NO: 134534 - protein, 10 aa, synthetic construct
SHMRGDRSQT

SEQ ID NO: 134535 - protein, 10 aa, synthetic construct
SHWRGDRSQT

SEQ ID NO: 134536 - protein, 10 aa, synthetic construct
SHFRGDRSQT

SEQ ID NO: 134537 - protein, 10 aa, synthetic construct
SHKRGDRSQT

SEQ ID NO: 134538 - protein, 10 aa, synthetic construct
SHRRGDRSQT

SEQ ID NO: 134539 - protein, 10 aa, synthetic construct
SHHRGDRSQT

SEQ ID NO: 134540 - protein, 10 aa, synthetic construct
SHSRGDRSQT

SEQ ID NO: 134541 - protein, 10 aa, synthetic construct
SHTRGDRSQT

SEQ ID NO: 134542 - protein, 10 aa, synthetic construct
SHYRGDRSQT

SEQ ID NO: 134543 - protein, 10 aa, synthetic construct
SHNRGDRSQT

SEQ ID NO: 134544 - protein, 10 aa, synthetic construct
SHQRGDRSQT

SEQ ID NO: 134545 - protein, 10 aa, synthetic construct
SHDRGDRSQT

SEQ ID NO: 134546 - protein, 10 aa, synthetic construct
SHERGDRSQT

SEQ ID NO: 134547 - protein, 10 aa, synthetic construct
SSGRGDRSQT

SEQ ID NO: 134548 - protein, 10 aa, synthetic construct
SSARGDRSQT

SEQ ID NO: 134549 - protein, 10 aa, synthetic construct
SSVRGDRSQT

SEQ ID NO: 134550 - protein, 10 aa, synthetic construct
SSPRGDRSQT

SEQ ID NO: 134551 - protein, 10 aa, synthetic construct
SSLRGDRSQT

SEQ ID NO: 134552 - protein, 10 aa, synthetic construct
SSIRGDRSQT

SEQ ID NO: 134553 - protein, 10 aa, synthetic construct
SSMRGDRSQT

SEQ ID NO: 134554 - protein, 10 aa, synthetic construct
SSWRGDRSQT

SEQ ID NO: 134555 - protein, 10 aa, synthetic construct
SSFRGDRSQT

SEQ ID NO: 134556 - protein, 10 aa, synthetic construct
SSKRGDRSQT

SEQ ID NO: 134557 - protein, 10 aa, synthetic construct
SSRRGDRSQT

SEQ ID NO: 134558 - protein, 10 aa, synthetic construct
SSHRGDRSQT

SEQ ID NO: 134559 - protein, 10 aa, synthetic construct
SSSRGDRSQT

SEQ ID NO: 134560 - protein, 10 aa, synthetic construct
SSTRGDRSQT

SEQ ID NO: 134561 - protein, 10 aa, synthetic construct
SSYRGDRSQT

SEQ ID NO: 134562 - protein, 10 aa, synthetic construct
SSNRGDRSQT

SEQ ID NO: 134563 - protein, 10 aa, synthetic construct
SSQRGDRSQT

SEQ ID NO: 134564 - protein, 10 aa, synthetic construct
SSDRGDRSQT

SEQ ID NO: 134565 - protein, 10 aa, synthetic construct
SSERGDRSQT

SEQ ID NO: 134566 - protein, 10 aa, synthetic construct
STGRGDRSQT

SEQ ID NO: 134567 - protein, 10 aa, synthetic construct
STARGDRSQT

SEQ ID NO: 134568 - protein, 10 aa, synthetic construct
STVRGDRSQT

SEQ ID NO: 134569 - protein, 10 aa, synthetic construct
STPRGDRSQT

SEQ ID NO: 134570 - protein, 10 aa, synthetic construct
STLRGDRSQT

SEQ ID NO: 134571 - protein, 10 aa, synthetic construct
STIRGDRSQT

SEQ ID NO: 134572 - protein, 10 aa, synthetic construct
STMRGDRSQT

SEQ ID NO: 134573 - protein, 10 aa, synthetic construct
STWRGDRSQT

SEQ ID NO: 134574 - protein, 10 aa, synthetic construct
STFRGDRSQT

SEQ ID NO: 134575 - protein, 10 aa, synthetic construct
STKRGDRSQT

SEQ ID NO: 134576 - protein, 10 aa, synthetic construct
STRRGDRSQT

SEQ ID NO: 134577 - protein, 10 aa, synthetic construct
STHRGDRSQT

SEQ ID NO: 134578 - protein, 10 aa, synthetic construct
STSRGDRSQT

SEQ ID NO: 134579 - protein, 10 aa, synthetic construct
STTRGDRSQT

SEQ ID NO: 134580 - protein, 10 aa, synthetic construct
STYRGDRSQT

SEQ ID NO: 134581 - protein, 10 aa, synthetic construct
STNRGDRSQT

SEQ ID NO: 134582 - protein, 10 aa, synthetic construct
STQRGDRSQT

SEQ ID NO: 134583 - protein, 10 aa, synthetic construct
STDRGDRSQT

SEQ ID NO: 134584 - protein, 10 aa, synthetic construct
STERGDRSQT

SEQ ID NO: 134585 - protein, 10 aa, synthetic construct
SYGRGDRSQT

SEQ ID NO: 134586 - protein, 10 aa, synthetic construct
SYARGDRSQT

SEQ ID NO: 134587 - protein, 10 aa, synthetic construct
SYVRGDRSQT

SEQ ID NO: 134588 - protein, 10 aa, synthetic construct
SYPRGDRSQT

SEQ ID NO: 134589 - protein, 10 aa, synthetic construct
SYLRGDRSQT

SEQ ID NO: 134590 - protein, 10 aa, synthetic construct
SYIRGDRSQT

SEQ ID NO: 134591 - protein, 10 aa, synthetic construct
SYMRGDRSQT

SEQ ID NO: 134592 - protein, 10 aa, synthetic construct
SYWRGDRSQT

SEQ ID NO: 134593 - protein, 10 aa, synthetic construct
SYFRGDRSQT

SEQ ID NO: 134594 - protein, 10 aa, synthetic construct
SYKRGDRSQT

SEQ ID NO: 134595 - protein, 10 aa, synthetic construct
SYRRGDRSQT

SEQ ID NO: 134596 - protein, 10 aa, synthetic construct
SYHRGDRSQT

SEQ ID NO: 134597 - protein, 10 aa, synthetic construct
SYSRGDRSQT

SEQ ID NO: 134598 - protein, 10 aa, synthetic construct
SYTRGDRSQT

SEQ ID NO: 134599 - protein, 10 aa, synthetic construct
SYYRGDRSQT

SEQ ID NO: 134600 - protein, 10 aa, synthetic construct
SYNRGDRSQT

SEQ ID NO: 134601 - protein, 10 aa, synthetic construct
SYQRGDRSQT

SEQ ID NO: 134602 - protein, 10 aa, synthetic construct
SYDRGDRSQT

SEQ ID NO: 134603 - protein, 10 aa, synthetic construct
SYERGDRSQT

SEQ ID NO: 134604 - protein, 10 aa, synthetic construct
SNGRGDRSQT

SEQ ID NO: 134605 - protein, 10 aa, synthetic construct
SNARGDRSQT

SEQ ID NO: 134606 - protein, 10 aa, synthetic construct
SNVRGDRSQT

SEQ ID NO: 134607 - protein, 10 aa, synthetic construct
SNPRGDRSQT

SEQ ID NO: 134608 - protein, 10 aa, synthetic construct
SNLRGDRSQT

SEQ ID NO: 134609 - protein, 10 aa, synthetic construct
SNIRGDRSQT

SEQ ID NO: 134610 - protein, 10 aa, synthetic construct
SNMRGDRSQT

SEQ ID NO: 134611 - protein, 10 aa, synthetic construct
SNWRGDRSQT

SEQ ID NO: 134612 - protein, 10 aa, synthetic construct
SNFRGDRSQT

SEQ ID NO: 134613 - protein, 10 aa, synthetic construct
SNKRGDRSQT

SEQ ID NO: 134614 - protein, 10 aa, synthetic construct
SNRRGDRSQT

SEQ ID NO: 134615 - protein, 10 aa, synthetic construct
SNHRGDRSQT

SEQ ID NO: 134616 - protein, 10 aa, synthetic construct
SNSRGDRSQT

SEQ ID NO: 134617 - protein, 10 aa, synthetic construct
SNTRGDRSQT

SEQ ID NO: 134618 - protein, 10 aa, synthetic construct
SNYRGDRSQT

SEQ ID NO: 134619 - protein, 10 aa, synthetic construct
SNNRGDRSQT

SEQ ID NO: 134620 - protein, 10 aa, synthetic construct
SNQRGDRSQT

SEQ ID NO: 134621 - protein, 10 aa, synthetic construct
SNDRGDRSQT

SEQ ID NO: 134622 - protein, 10 aa, synthetic construct
SNERGDRSQT

SEQ ID NO: 134623 - protein, 10 aa, synthetic construct
SQGRGDRSQT

SEQ ID NO: 134624 - protein, 10 aa, synthetic construct
SQARGDRSQT

SEQ ID NO: 134625 - protein, 10 aa, synthetic construct
SQVRGDRSQT

SEQ ID NO: 134626 - protein, 10 aa, synthetic construct
SQPRGDRSQT

SEQ ID NO: 134627 - protein, 10 aa, synthetic construct
SQLRGDRSQT

SEQ ID NO: 134628 - protein, 10 aa, synthetic construct
SQIRGDRSQT

SEQ ID NO: 134629 - protein, 10 aa, synthetic construct
SQMRGDRSQT

SEQ ID NO: 134630 - protein, 10 aa, synthetic construct
SQWRGDRSQT

SEQ ID NO: 134631 - protein, 10 aa, synthetic construct
SQFRGDRSQT

SEQ ID NO: 134632 - protein, 10 aa, synthetic construct
SQKRGDRSQT

SEQ ID NO: 134633 - protein, 10 aa, synthetic construct
SQRRGDRSQT

SEQ ID NO: 134634 - protein, 10 aa, synthetic construct
SQHRGDRSQT

SEQ ID NO: 134635 - protein, 10 aa, synthetic construct
SQSRGDRSQT

SEQ ID NO: 134636 - protein, 10 aa, synthetic construct
SQTRGDRSQT

SEQ ID NO: 134637 - protein, 10 aa, synthetic construct
SQYRGDRSQT

SEQ ID NO: 134638 - protein, 10 aa, synthetic construct
SQNRGDRSQT

SEQ ID NO: 134639 - protein, 10 aa, synthetic construct
SQQRGDRSQT

SEQ ID NO: 134640 - protein, 10 aa, synthetic construct
SQDRGDRSQT

SEQ ID NO: 134641 - protein, 10 aa, synthetic construct
SQERGDRSQT

SEQ ID NO: 134642 - protein, 10 aa, synthetic construct
SDGRGDRSQT

SEQ ID NO: 134643 - protein, 10 aa, synthetic construct
SDARGDRSQT

SEQ ID NO: 134644 - protein, 10 aa, synthetic construct
SDVRGDRSQT

SEQ ID NO: 134645 - protein, 10 aa, synthetic construct
SDPRGDRSQT

SEQ ID NO: 134646 - protein, 10 aa, synthetic construct
SDLRGDRSQT

SEQ ID NO: 134647 - protein, 10 aa, synthetic construct
SDIRGDRSQT

SEQ ID NO: 134648 - protein, 10 aa, synthetic construct
SDMRGDRSQT

SEQ ID NO: 134649 - protein, 10 aa, synthetic construct
SDWRGDRSQT

SEQ ID NO: 134650 - protein, 10 aa, synthetic construct
SDFRGDRSQT

SEQ ID NO: 134651 - protein, 10 aa, synthetic construct
SDKRGDRSQT

SEQ ID NO: 134652 - protein, 10 aa, synthetic construct
SDRRGDRSQT

SEQ ID NO: 134653 - protein, 10 aa, synthetic construct
SDHRGDRSQT

SEQ ID NO: 134654 - protein, 10 aa, synthetic construct
SDSRGDRSQT

SEQ ID NO: 134655 - protein, 10 aa, synthetic construct
SDTRGDRSQT

SEQ ID NO: 134656 - protein, 10 aa, synthetic construct
SDYRGDRSQT

SEQ ID NO: 134657 - protein, 10 aa, synthetic construct
SDNRGDRSQT

SEQ ID NO: 134658 - protein, 10 aa, synthetic construct
SDQRGDRSQT

SEQ ID NO: 134659 - protein, 10 aa, synthetic construct
SDDRGDRSQT

SEQ ID NO: 134660 - protein, 10 aa, synthetic construct
SDERGDRSQT

SEQ ID NO: 134661 - protein, 10 aa, synthetic construct
SEGRGDRSQT

SEQ ID NO: 134662 - protein, 10 aa, synthetic construct
SEARGDRSQT

SEQ ID NO: 134663 - protein, 10 aa, synthetic construct
SEVRGDRSQT

SEQ ID NO: 134664 - protein, 10 aa, synthetic construct
SEPRGDRSQT

SEQ ID NO: 134665 - protein, 10 aa, synthetic construct
SELRGDRSQT

SEQ ID NO: 134666 - protein, 10 aa, synthetic construct
SEIRGDRSQT

SEQ ID NO: 134667 - protein, 10 aa, synthetic construct
SEMRGDRSQT

SEQ ID NO: 134668 - protein, 10 aa, synthetic construct
SEWRGDRSQT

SEQ ID NO: 134669 - protein, 10 aa, synthetic construct
SEFRGDRSQT

SEQ ID NO: 134670 - protein, 10 aa, synthetic construct
SEKRGDRSQT

SEQ ID NO: 134671 - protein, 10 aa, synthetic construct
SERRGDRSQT

SEQ ID NO: 134672 - protein, 10 aa, synthetic construct
SEHRGDRSQT

SEQ ID NO: 134673 - protein, 10 aa, synthetic construct
SESRGDRSQT

SEQ ID NO: 134674 - protein, 10 aa, synthetic construct
SETRGDRSQT

SEQ ID NO: 134675 - protein, 10 aa, synthetic construct
SEYRGDRSQT

SEQ ID NO: 134676 - protein, 10 aa, synthetic construct
SENRGDRSQT

SEQ ID NO: 134677 - protein, 10 aa, synthetic construct
SEQRGDRSQT

SEQ ID NO: 134678 - protein, 10 aa, synthetic construct
SEDRGDRSQT

SEQ ID NO: 134679 - protein, 10 aa, synthetic construct
SEERGDRSQT

SEQ ID NO: 134680 - protein, 10 aa, synthetic construct
TGGRGDRSQT

SEQ ID NO: 134681 - protein, 10 aa, synthetic construct
TGARGDRSQT

SEQ ID NO: 134682 - protein, 10 aa, synthetic construct
TGVRGDRSQT

SEQ ID NO: 134683 - protein, 10 aa, synthetic construct
TGPRGDRSQT

SEQ ID NO: 134684 - protein, 10 aa, synthetic construct
TGLRGDRSQT

SEQ ID NO: 134685 - protein, 10 aa, synthetic construct
TGIRGDRSQT

SEQ ID NO: 134686 - protein, 10 aa, synthetic construct
TGMRGDRSQT

SEQ ID NO: 134687 - protein, 10 aa, synthetic construct
TGWRGDRSQT

SEQ ID NO: 134688 - protein, 10 aa, synthetic construct
TGFRGDRSQT

SEQ ID NO: 134689 - protein, 10 aa, synthetic construct
TGKRGDRSQT

SEQ ID NO: 134690 - protein, 10 aa, synthetic construct
TGRRGDRSQT

SEQ ID NO: 134691 - protein, 10 aa, synthetic construct
TGHRGDRSQT

SEQ ID NO: 134692 - protein, 10 aa, synthetic construct
TGSRGDRSQT

SEQ ID NO: 134693 - protein, 10 aa, synthetic construct
TGTRGDRSQT

SEQ ID NO: 134694 - protein, 10 aa, synthetic construct
TGYRGDRSQT

SEQ ID NO: 134695 - protein, 10 aa, synthetic construct
TGNRGDRSQT

SEQ ID NO: 134696 - protein, 10 aa, synthetic construct
TGQRGDRSQT

SEQ ID NO: 134697 - protein, 10 aa, synthetic construct
TGDRGDRSQT

SEQ ID NO: 134698 - protein, 10 aa, synthetic construct
TGERGDRSQT

SEQ ID NO: 134699 - protein, 10 aa, synthetic construct
TAGRGDRSQT

SEQ ID NO: 134700 - protein, 10 aa, synthetic construct
TAARGDRSQT

SEQ ID NO: 134701 - protein, 10 aa, synthetic construct
TAVRGDRSQT

SEQ ID NO: 134702 - protein, 10 aa, synthetic construct
TAPRGDRSQT

SEQ ID NO: 134703 - protein, 10 aa, synthetic construct
TALRGDRSQT

SEQ ID NO: 134704 - protein, 10 aa, synthetic construct
TAIRGDRSQT

SEQ ID NO: 134705 - protein, 10 aa, synthetic construct
TAMRGDRSQT

SEQ ID NO: 134706 - protein, 10 aa, synthetic construct
TAWRGDRSQT

SEQ ID NO: 134707 - protein, 10 aa, synthetic construct
TAFRGDRSQT

SEQ ID NO: 134708 - protein, 10 aa, synthetic construct
TAKRGDRSQT

SEQ ID NO: 134709 - protein, 10 aa, synthetic construct
TARRGDRSQT

SEQ ID NO: 134710 - protein, 10 aa, synthetic construct
TAHRGDRSQT

SEQ ID NO: 134711 - protein, 10 aa, synthetic construct
TASRGDRSQT

SEQ ID NO: 134712 - protein, 10 aa, synthetic construct
TATRGDRSQT

SEQ ID NO: 134713 - protein, 10 aa, synthetic construct
TAYRGDRSQT

SEQ ID NO: 134714 - protein, 10 aa, synthetic construct
TANRGDRSQT

SEQ ID NO: 134715 - protein, 10 aa, synthetic construct
TAQRGDRSQT

SEQ ID NO: 134716 - protein, 10 aa, synthetic construct
TADRGDRSQT

SEQ ID NO: 134717 - protein, 10 aa, synthetic construct
TAERGDRSQT

SEQ ID NO: 134718 - protein, 10 aa, synthetic construct
TVGRGDRSQT

SEQ ID NO: 134719 - protein, 10 aa, synthetic construct
TVARGDRSQT

SEQ ID NO: 134720 - protein, 10 aa, synthetic construct
TVVRGDRSQT

SEQ ID NO: 134721 - protein, 10 aa, synthetic construct
TVPRGDRSQT

SEQ ID NO: 134722 - protein, 10 aa, synthetic construct
TVLRGDRSQT

SEQ ID NO: 134723 - protein, 10 aa, synthetic construct
TVIRGDRSQT

SEQ ID NO: 134724 - protein, 10 aa, synthetic construct
TVMRGDRSQT

SEQ ID NO: 134725 - protein, 10 aa, synthetic construct
TVWRGDRSQT

SEQ ID NO: 134726 - protein, 10 aa, synthetic construct
TVFRGDRSQT

SEQ ID NO: 134727 - protein, 10 aa, synthetic construct
TVKRGDRSQT

SEQ ID NO: 134728 - protein, 10 aa, synthetic construct
TVRRGDRSQT

SEQ ID NO: 134729 - protein, 10 aa, synthetic construct
TVHRGDRSQT

SEQ ID NO: 134730 - protein, 10 aa, synthetic construct
TVSRGDRSQT

SEQ ID NO: 134731 - protein, 10 aa, synthetic construct
TVTRGDRSQT

SEQ ID NO: 134732 - protein, 10 aa, synthetic construct
TVYRGDRSQT

SEQ ID NO: 134733 - protein, 10 aa, synthetic construct
TVNRGDRSQT

SEQ ID NO: 134734 - protein, 10 aa, synthetic construct
TVQRGDRSQT

SEQ ID NO: 134735 - protein, 10 aa, synthetic construct
TVDRGDRSQT

SEQ ID NO: 134736 - protein, 10 aa, synthetic construct
TVERGDRSQT

SEQ ID NO: 134737 - protein, 10 aa, synthetic construct
TPGRGDRSQT

SEQ ID NO: 134738 - protein, 10 aa, synthetic construct
TPARGDRSQT

SEQ ID NO: 134739 - protein, 10 aa, synthetic construct
TPVRGDRSQT

SEQ ID NO: 134740 - protein, 10 aa, synthetic construct
TPPRGDRSQT

SEQ ID NO: 134741 - protein, 10 aa, synthetic construct
TPLRGDRSQT

SEQ ID NO: 134742 - protein, 10 aa, synthetic construct
TPIRGDRSQT

SEQ ID NO: 134743 - protein, 10 aa, synthetic construct
TPMRGDRSQT

SEQ ID NO: 134744 - protein, 10 aa, synthetic construct
TPWRGDRSQT

SEQ ID NO: 134745 - protein, 10 aa, synthetic construct
TPFRGDRSQT

SEQ ID NO: 134746 - protein, 10 aa, synthetic construct
TPKRGDRSQT

SEQ ID NO: 134747 - protein, 10 aa, synthetic construct
TPRRGDRSQT

SEQ ID NO: 134748 - protein, 10 aa, synthetic construct
TPHRGDRSQT

SEQ ID NO: 134749 - protein, 10 aa, synthetic construct
TPSRGDRSQT

SEQ ID NO: 134750 - protein, 10 aa, synthetic construct
TPTRGDRSQT

SEQ ID NO: 134751 - protein, 10 aa, synthetic construct
TPYRGDRSQT

SEQ ID NO: 134752 - protein, 10 aa, synthetic construct
TPNRGDRSQT

SEQ ID NO: 134753 - protein, 10 aa, synthetic construct
TPQRGDRSQT

SEQ ID NO: 134754 - protein, 10 aa, synthetic construct
TPDRGDRSQT

SEQ ID NO: 134755 - protein, 10 aa, synthetic construct
TPERGDRSQT

SEQ ID NO: 134756 - protein, 10 aa, synthetic construct
TLGRGDRSQT

SEQ ID NO: 134757 - protein, 10 aa, synthetic construct
TLARGDRSQT

SEQ ID NO: 134758 - protein, 10 aa, synthetic construct
TLVRGDRSQT

SEQ ID NO: 134759 - protein, 10 aa, synthetic construct
TLPRGDRSQT

SEQ ID NO: 134760 - protein, 10 aa, synthetic construct
TLLRGDRSQT

SEQ ID NO: 134761 - protein, 10 aa, synthetic construct
TLIRGDRSQT

SEQ ID NO: 134762 - protein, 10 aa, synthetic construct
TLMRGDRSQT

SEQ ID NO: 134763 - protein, 10 aa, synthetic construct
TLWRGDRSQT

SEQ ID NO: 134764 - protein, 10 aa, synthetic construct
TLFRGDRSQT

SEQ ID NO: 134765 - protein, 10 aa, synthetic construct
TLKRGDRSQT

SEQ ID NO: 134766 - protein, 10 aa, synthetic construct
TLRRGDRSQT

SEQ ID NO: 134767 - protein, 10 aa, synthetic construct
TLHRGDRSQT

SEQ ID NO: 134768 - protein, 10 aa, synthetic construct
TLSRGDRSQT

SEQ ID NO: 134769 - protein, 10 aa, synthetic construct
TLTRGDRSQT

SEQ ID NO: 134770 - protein, 10 aa, synthetic construct
TLYRGDRSQT

SEQ ID NO: 134771 - protein, 10 aa, synthetic construct
TLNRGDRSQT

SEQ ID NO: 134772 - protein, 10 aa, synthetic construct
TLQRGDRSQT

SEQ ID NO: 134773 - protein, 10 aa, synthetic construct
TLDRGDRSQT

SEQ ID NO: 134774 - protein, 10 aa, synthetic construct
TLERGDRSQT

SEQ ID NO: 134775 - protein, 10 aa, synthetic construct
TIGRGDRSQT

SEQ ID NO: 134776 - protein, 10 aa, synthetic construct
TIARGDRSQT

SEQ ID NO: 134777 - protein, 10 aa, synthetic construct
TIVRGDRSQT

SEQ ID NO: 134778 - protein, 10 aa, synthetic construct
TIPRGDRSQT

SEQ ID NO: 134779 - protein, 10 aa, synthetic construct
TILRGDRSQT

SEQ ID NO: 134780 - protein, 10 aa, synthetic construct
TIIRGDRSQT

SEQ ID NO: 134781 - protein, 10 aa, synthetic construct
TIMRGDRSQT

SEQ ID NO: 134782 - protein, 10 aa, synthetic construct
TIWRGDRSQT

SEQ ID NO: 134783 - protein, 10 aa, synthetic construct
TIFRGDRSQT

SEQ ID NO: 134784 - protein, 10 aa, synthetic construct
TIKRGDRSQT

SEQ ID NO: 134785 - protein, 10 aa, synthetic construct
TIRRGDRSQT

SEQ ID NO: 134786 - protein, 10 aa, synthetic construct
TIHRGDRSQT

SEQ ID NO: 134787 - protein, 10 aa, synthetic construct
TISRGDRSQT

SEQ ID NO: 134788 - protein, 10 aa, synthetic construct
TITRGDRSQT

SEQ ID NO: 134789 - protein, 10 aa, synthetic construct
TIYRGDRSQT

SEQ ID NO: 134790 - protein, 10 aa, synthetic construct
TINRGDRSQT

SEQ ID NO: 134791 - protein, 10 aa, synthetic construct
TIQRGDRSQT

SEQ ID NO: 134792 - protein, 10 aa, synthetic construct
TIDRGDRSQT

SEQ ID NO: 134793 - protein, 10 aa, synthetic construct
TIERGDRSQT

SEQ ID NO: 134794 - protein, 10 aa, synthetic construct
TMGRGDRSQT

SEQ ID NO: 134795 - protein, 10 aa, synthetic construct
TMARGDRSQT

SEQ ID NO: 134796 - protein, 10 aa, synthetic construct
TMVRGDRSQT

SEQ ID NO: 134797 - protein, 10 aa, synthetic construct
TMPRGDRSQT

SEQ ID NO: 134798 - protein, 10 aa, synthetic construct
TMLRGDRSQT

SEQ ID NO: 134799 - protein, 10 aa, synthetic construct
TMIRGDRSQT

SEQ ID NO: 134800 - protein, 10 aa, synthetic construct
TMMRGDRSQT

SEQ ID NO: 134801 - protein, 10 aa, synthetic construct
TMWRGDRSQT

SEQ ID NO: 134802 - protein, 10 aa, synthetic construct
TMFRGDRSQT

SEQ ID NO: 134803 - protein, 10 aa, synthetic construct
TMKRGDRSQT

SEQ ID NO: 134804 - protein, 10 aa, synthetic construct
TMRRGDRSQT

SEQ ID NO: 134805 - protein, 10 aa, synthetic construct
TMHRGDRSQT

SEQ ID NO: 134806 - protein, 10 aa, synthetic construct
TMSRGDRSQT

SEQ ID NO: 134807 - protein, 10 aa, synthetic construct
TMTRGDRSQT

SEQ ID NO: 134808 - protein, 10 aa, synthetic construct
TMYRGDRSQT

SEQ ID NO: 134809 - protein, 10 aa, synthetic construct
TMNRGDRSQT

SEQ ID NO: 134810 - protein, 10 aa, synthetic construct
TMQRGDRSQT

SEQ ID NO: 134811 - protein, 10 aa, synthetic construct
TMDRGDRSQT

SEQ ID NO: 134812 - protein, 10 aa, synthetic construct
TMERGDRSQT

SEQ ID NO: 134813 - protein, 10 aa, synthetic construct
TWGRGDRSQT

SEQ ID NO: 134814 - protein, 10 aa, synthetic construct
TWARGDRSQT

SEQ ID NO: 134815 - protein, 10 aa, synthetic construct
TWVRGDRSQT

SEQ ID NO: 134816 - protein, 10 aa, synthetic construct
TWPRGDRSQT

SEQ ID NO: 134817 - protein, 10 aa, synthetic construct
TWLRGDRSQT

SEQ ID NO: 134818 - protein, 10 aa, synthetic construct
TWIRGDRSQT

SEQ ID NO: 134819 - protein, 10 aa, synthetic construct
TWMRGDRSQT

SEQ ID NO: 134820 - protein, 10 aa, synthetic construct
TWWRGDRSQT

SEQ ID NO: 134821 - protein, 10 aa, synthetic construct
TWFRGDRSQT

SEQ ID NO: 134822 - protein, 10 aa, synthetic construct
TWKRGDRSQT

SEQ ID NO: 134823 - protein, 10 aa, synthetic construct
TWRRGDRSQT

SEQ ID NO: 134824 - protein, 10 aa, synthetic construct
TWHRGDRSQT

SEQ ID NO: 134825 - protein, 10 aa, synthetic construct
TWSRGDRSQT

SEQ ID NO: 134826 - protein, 10 aa, synthetic construct
TWTRGDRSQT

SEQ ID NO: 134827 - protein, 10 aa, synthetic construct
TWYRGDRSQT

SEQ ID NO: 134828 - protein, 10 aa, synthetic construct
TWNRGDRSQT

SEQ ID NO: 134829 - protein, 10 aa, synthetic construct
TWQRGDRSQT

SEQ ID NO: 134830 - protein, 10 aa, synthetic construct
TWDRGDRSQT

SEQ ID NO: 134831 - protein, 10 aa, synthetic construct
TWERGDRSQT

SEQ ID NO: 134832 - protein, 10 aa, synthetic construct
TFGRGDRSQT

SEQ ID NO: 134833 - protein, 10 aa, synthetic construct
TFARGDRSQT

SEQ ID NO: 134834 - protein, 10 aa, synthetic construct
TFVRGDRSQT

SEQ ID NO: 134835 - protein, 10 aa, synthetic construct
TFPRGDRSQT

SEQ ID NO: 134836 - protein, 10 aa, synthetic construct
TFLRGDRSQT

SEQ ID NO: 134837 - protein, 10 aa, synthetic construct
TFIRGDRSQT

SEQ ID NO: 134838 - protein, 10 aa, synthetic construct
TFMRGDRSQT

SEQ ID NO: 134839 - protein, 10 aa, synthetic construct
TFWRGDRSQT

SEQ ID NO: 134840 - protein, 10 aa, synthetic construct
TFFRGDRSQT

SEQ ID NO: 134841 - protein, 10 aa, synthetic construct
TFKRGDRSQT

SEQ ID NO: 134842 - protein, 10 aa, synthetic construct
TFRRGDRSQT

SEQ ID NO: 134843 - protein, 10 aa, synthetic construct
TFHRGDRSQT

SEQ ID NO: 134844 - protein, 10 aa, synthetic construct
TFSRGDRSQT

SEQ ID NO: 134845 - protein, 10 aa, synthetic construct
TFTRGDRSQT

SEQ ID NO: 134846 - protein, 10 aa, synthetic construct
TFYRGDRSQT

SEQ ID NO: 134847 - protein, 10 aa, synthetic construct
TFNRGDRSQT

SEQ ID NO: 134848 - protein, 10 aa, synthetic construct
TFQRGDRSQT

SEQ ID NO: 134849 - protein, 10 aa, synthetic construct
TFDRGDRSQT

SEQ ID NO: 134850 - protein, 10 aa, synthetic construct
TFERGDRSQT

SEQ ID NO: 134851 - protein, 10 aa, synthetic construct
TKGRGDRSQT

SEQ ID NO: 134852 - protein, 10 aa, synthetic construct
TKARGDRSQT

SEQ ID NO: 134853 - protein, 10 aa, synthetic construct
TKVRGDRSQT

SEQ ID NO: 134854 - protein, 10 aa, synthetic construct
TKPRGDRSQT

SEQ ID NO: 134855 - protein, 10 aa, synthetic construct
TKLRGDRSQT

SEQ ID NO: 134856 - protein, 10 aa, synthetic construct
TKIRGDRSQT

SEQ ID NO: 134857 - protein, 10 aa, synthetic construct
TKMRGDRSQT

SEQ ID NO: 134858 - protein, 10 aa, synthetic construct
TKWRGDRSQT

SEQ ID NO: 134859 - protein, 10 aa, synthetic construct
TKFRGDRSQT

SEQ ID NO: 134860 - protein, 10 aa, synthetic construct
TKKRGDRSQT

SEQ ID NO: 134861 - protein, 10 aa, synthetic construct
TKRRGDRSQT

SEQ ID NO: 134862 - protein, 10 aa, synthetic construct
TKHRGDRSQT

SEQ ID NO: 134863 - protein, 10 aa, synthetic construct
TKSRGDRSQT

SEQ ID NO: 134864 - protein, 10 aa, synthetic construct
TKTRGDRSQT

SEQ ID NO: 134865 - protein, 10 aa, synthetic construct
TKYRGDRSQT

SEQ ID NO: 134866 - protein, 10 aa, synthetic construct
TKNRGDRSQT

SEQ ID NO: 134867 - protein, 10 aa, synthetic construct
TKQRGDRSQT

SEQ ID NO: 134868 - protein, 10 aa, synthetic construct
TKDRGDRSQT

SEQ ID NO: 134869 - protein, 10 aa, synthetic construct
TKERGDRSQT

SEQ ID NO: 134870 - protein, 10 aa, synthetic construct
TRGRGDRSQT

SEQ ID NO: 134871 - protein, 10 aa, synthetic construct
TRARGDRSQT

SEQ ID NO: 134872 - protein, 10 aa, synthetic construct
TRVRGDRSQT

SEQ ID NO: 134873 - protein, 10 aa, synthetic construct
TRPRGDRSQT

SEQ ID NO: 134874 - protein, 10 aa, synthetic construct
TRLRGDRSQT

SEQ ID NO: 134875 - protein, 10 aa, synthetic construct
TRIRGDRSQT

SEQ ID NO: 134876 - protein, 10 aa, synthetic construct
TRMRGDRSQT

SEQ ID NO: 134877 - protein, 10 aa, synthetic construct
TRWRGDRSQT

SEQ ID NO: 134878 - protein, 10 aa, synthetic construct
TRFRGDRSQT

SEQ ID NO: 134879 - protein, 10 aa, synthetic construct
TRKRGDRSQT

SEQ ID NO: 134880 - protein, 10 aa, synthetic construct
TRRRGDRSQT

SEQ ID NO: 134881 - protein, 10 aa, synthetic construct
TRHRGDRSQT

SEQ ID NO: 134882 - protein, 10 aa, synthetic construct
TRSRGDRSQT

SEQ ID NO: 134883 - protein, 10 aa, synthetic construct
TRTRGDRSQT

SEQ ID NO: 134884 - protein, 10 aa, synthetic construct
TRYRGDRSQT

SEQ ID NO: 134885 - protein, 10 aa, synthetic construct
TRNRGDRSQT

SEQ ID NO: 134886 - protein, 10 aa, synthetic construct
TRQRGDRSQT

SEQ ID NO: 134887 - protein, 10 aa, synthetic construct
TRDRGDRSQT

SEQ ID NO: 134888 - protein, 10 aa, synthetic construct
TRERGDRSQT

SEQ ID NO: 134889 - protein, 10 aa, synthetic construct
THGRGDRSQT

SEQ ID NO: 134890 - protein, 10 aa, synthetic construct
THARGDRSQT

SEQ ID NO: 134891 - protein, 10 aa, synthetic construct
THVRGDRSQT

SEQ ID NO: 134892 - protein, 10 aa, synthetic construct
THPRGDRSQT

SEQ ID NO: 134893 - protein, 10 aa, synthetic construct
THLRGDRSQT

SEQ ID NO: 134894 - protein, 10 aa, synthetic construct
THIRGDRSQT

SEQ ID NO: 134895 - protein, 10 aa, synthetic construct
THMRGDRSQT

SEQ ID NO: 134896 - protein, 10 aa, synthetic construct
THWRGDRSQT

SEQ ID NO: 134897 - protein, 10 aa, synthetic construct
THFRGDRSQT

SEQ ID NO: 134898 - protein, 10 aa, synthetic construct
THKRGDRSQT

SEQ ID NO: 134899 - protein, 10 aa, synthetic construct
THRRGDRSQT

SEQ ID NO: 134900 - protein, 10 aa, synthetic construct
THHRGDRSQT

SEQ ID NO: 134901 - protein, 10 aa, synthetic construct
THSRGDRSQT

SEQ ID NO: 134902 - protein, 10 aa, synthetic construct
THTRGDRSQT

SEQ ID NO: 134903 - protein, 10 aa, synthetic construct
THYRGDRSQT

SEQ ID NO: 134904 - protein, 10 aa, synthetic construct
THNRGDRSQT

SEQ ID NO: 134905 - protein, 10 aa, synthetic construct
THQRGDRSQT

SEQ ID NO: 134906 - protein, 10 aa, synthetic construct
THDRGDRSQT

SEQ ID NO: 134907 - protein, 10 aa, synthetic construct
THERGDRSQT

SEQ ID NO: 134908 - protein, 10 aa, synthetic construct
TSGRGDRSQT

SEQ ID NO: 134909 - protein, 10 aa, synthetic construct
TSARGDRSQT

SEQ ID NO: 134910 - protein, 10 aa, synthetic construct
TSVRGDRSQT

SEQ ID NO: 134911 - protein, 10 aa, synthetic construct
TSPRGDRSQT

SEQ ID NO: 134912 - protein, 10 aa, synthetic construct
TSLRGDRSQT

SEQ ID NO: 134913 - protein, 10 aa, synthetic construct
TSIRGDRSQT

SEQ ID NO: 134914 - protein, 10 aa, synthetic construct
TSMRGDRSQT

SEQ ID NO: 134915 - protein, 10 aa, synthetic construct
TSWRGDRSQT

SEQ ID NO: 134916 - protein, 10 aa, synthetic construct
TSFRGDRSQT

SEQ ID NO: 134917 - protein, 10 aa, synthetic construct
TSKRGDRSQT

SEQ ID NO: 134918 - protein, 10 aa, synthetic construct
TSRRGDRSQT

SEQ ID NO: 134919 - protein, 10 aa, synthetic construct
TSHRGDRSQT

SEQ ID NO: 134920 - protein, 10 aa, synthetic construct
TSSRGDRSQT

SEQ ID NO: 134921 - protein, 10 aa, synthetic construct
TSTRGDRSQT

SEQ ID NO: 134922 - protein, 10 aa, synthetic construct
TSYRGDRSQT

SEQ ID NO: 134923 - protein, 10 aa, synthetic construct
TSNRGDRSQT

SEQ ID NO: 134924 - protein, 10 aa, synthetic construct
TSQRGDRSQT

SEQ ID NO: 134925 - protein, 10 aa, synthetic construct
TSDRGDRSQT

SEQ ID NO: 134926 - protein, 10 aa, synthetic construct
TSERGDRSQT

SEQ ID NO: 134927 - protein, 10 aa, synthetic construct
TTGRGDRSQT

SEQ ID NO: 134928 - protein, 10 aa, synthetic construct
TTARGDRSQT

SEQ ID NO: 134929 - protein, 10 aa, synthetic construct
TTVRGDRSQT

SEQ ID NO: 134930 - protein, 10 aa, synthetic construct
TTPRGDRSQT

SEQ ID NO: 134931 - protein, 10 aa, synthetic construct
TTLRGDRSQT

SEQ ID NO: 134932 - protein, 10 aa, synthetic construct
TTIRGDRSQT

SEQ ID NO: 134933 - protein, 10 aa, synthetic construct
TTMRGDRSQT

SEQ ID NO: 134934 - protein, 10 aa, synthetic construct
TTWRGDRSQT

SEQ ID NO: 134935 - protein, 10 aa, synthetic construct
TTFRGDRSQT

SEQ ID NO: 134936 - protein, 10 aa, synthetic construct
TTKRGDRSQT

SEQ ID NO: 134937 - protein, 10 aa, synthetic construct
TTRRGDRSQT

SEQ ID NO: 134938 - protein, 10 aa, synthetic construct
TTHRGDRSQT

SEQ ID NO: 134939 - protein, 10 aa, synthetic construct
TTSRGDRSQT

SEQ ID NO: 134940 - protein, 10 aa, synthetic construct
TTTRGDRSQT

SEQ ID NO: 134941 - protein, 10 aa, synthetic construct
TTYRGDRSQT

SEQ ID NO: 134942 - protein, 10 aa, synthetic construct
TTNRGDRSQT

SEQ ID NO: 134943 - protein, 10 aa, synthetic construct
TTQRGDRSQT

SEQ ID NO: 134944 - protein, 10 aa, synthetic construct
TTDRGDRSQT

SEQ ID NO: 134945 - protein, 10 aa, synthetic construct
TTERGDRSQT

SEQ ID NO: 134946 - protein, 10 aa, synthetic construct
TYGRGDRSQT

SEQ ID NO: 134947 - protein, 10 aa, synthetic construct
TYARGDRSQT

SEQ ID NO: 134948 - protein, 10 aa, synthetic construct
TYVRGDRSQT

SEQ ID NO: 134949 - protein, 10 aa, synthetic construct
TYPRGDRSQT

SEQ ID NO: 134950 - protein, 10 aa, synthetic construct
TYLRGDRSQT

SEQ ID NO: 134951 - protein, 10 aa, synthetic construct
TYIRGDRSQT

SEQ ID NO: 134952 - protein, 10 aa, synthetic construct
TYMRGDRSQT

SEQ ID NO: 134953 - protein, 10 aa, synthetic construct
TYWRGDRSQT

SEQ ID NO: 134954 - protein, 10 aa, synthetic construct
TYFRGDRSQT

SEQ ID NO: 134955 - protein, 10 aa, synthetic construct
TYKRGDRSQT

SEQ ID NO: 134956 - protein, 10 aa, synthetic construct
TYRRGDRSQT

SEQ ID NO: 134957 - protein, 10 aa, synthetic construct
TYHRGDRSQT

SEQ ID NO: 134958 - protein, 10 aa, synthetic construct
TYSRGDRSQT

SEQ ID NO: 134959 - protein, 10 aa, synthetic construct
TYTRGDRSQT

SEQ ID NO: 134960 - protein, 10 aa, synthetic construct
TYYRGDRSQT

SEQ ID NO: 134961 - protein, 10 aa, synthetic construct
TYNRGDRSQT

SEQ ID NO: 134962 - protein, 10 aa, synthetic construct
TYQRGDRSQT

SEQ ID NO: 134963 - protein, 10 aa, synthetic construct
TYDRGDRSQT

SEQ ID NO: 134964 - protein, 10 aa, synthetic construct
TYERGDRSQT

SEQ ID NO: 134965 - protein, 10 aa, synthetic construct
TNGRGDRSQT

SEQ ID NO: 134966 - protein, 10 aa, synthetic construct
TNARGDRSQT

SEQ ID NO: 134967 - protein, 10 aa, synthetic construct
TNVRGDRSQT

SEQ ID NO: 134968 - protein, 10 aa, synthetic construct
TNPRGDRSQT

SEQ ID NO: 134969 - protein, 10 aa, synthetic construct
TNLRGDRSQT

SEQ ID NO: 134970 - protein, 10 aa, synthetic construct
TNIRGDRSQT

SEQ ID NO: 134971 - protein, 10 aa, synthetic construct
TNMRGDRSQT

SEQ ID NO: 134972 - protein, 10 aa, synthetic construct
TNWRGDRSQT

SEQ ID NO: 134973 - protein, 10 aa, synthetic construct
TNFRGDRSQT

SEQ ID NO: 134974 - protein, 10 aa, synthetic construct
TNKRGDRSQT

SEQ ID NO: 134975 - protein, 10 aa, synthetic construct
TNRRGDRSQT

SEQ ID NO: 134976 - protein, 10 aa, synthetic construct
TNHRGDRSQT

SEQ ID NO: 134977 - protein, 10 aa, synthetic construct
TNSRGDRSQT

SEQ ID NO: 134978 - protein, 10 aa, synthetic construct
TNTRGDRSQT

SEQ ID NO: 134979 - protein, 10 aa, synthetic construct
TNYRGDRSQT

SEQ ID NO: 134980 - protein, 10 aa, synthetic construct
TNNRGDRSQT

SEQ ID NO: 134981 - protein, 10 aa, synthetic construct
TNQRGDRSQT

SEQ ID NO: 134982 - protein, 10 aa, synthetic construct
TNDRGDRSQT

SEQ ID NO: 134983 - protein, 10 aa, synthetic construct
TNERGDRSQT

SEQ ID NO: 134984 - protein, 10 aa, synthetic construct
TQGRGDRSQT

SEQ ID NO: 134985 - protein, 10 aa, synthetic construct
TQARGDRSQT

SEQ ID NO: 134986 - protein, 10 aa, synthetic construct
TQVRGDRSQT

SEQ ID NO: 134987 - protein, 10 aa, synthetic construct
TQPRGDRSQT

SEQ ID NO: 134988 - protein, 10 aa, synthetic construct
TQLRGDRSQT

SEQ ID NO: 134989 - protein, 10 aa, synthetic construct
TQIRGDRSQT

SEQ ID NO: 134990 - protein, 10 aa, synthetic construct
TQMRGDRSQT

SEQ ID NO: 134991 - protein, 10 aa, synthetic construct
TQWRGDRSQT

SEQ ID NO: 134992 - protein, 10 aa, synthetic construct
TQFRGDRSQT

SEQ ID NO: 134993 - protein, 10 aa, synthetic construct
TQKRGDRSQT

SEQ ID NO: 134994 - protein, 10 aa, synthetic construct
TQRRGDRSQT

SEQ ID NO: 134995 - protein, 10 aa, synthetic construct
TQHRGDRSQT

SEQ ID NO: 134996 - protein, 10 aa, synthetic construct
TQSRGDRSQT

SEQ ID NO: 134997 - protein, 10 aa, synthetic construct
TQTRGDRSQT

SEQ ID NO: 134998 - protein, 10 aa, synthetic construct
TQYRGDRSQT

SEQ ID NO: 134999 - protein, 10 aa, synthetic construct
TQNRGDRSQT

SEQ ID NO: 135000 - protein, 10 aa, synthetic construct
TQQRGDRSQT

SEQ ID NO: 135001 - protein, 10 aa, synthetic construct
TQDRGDRSQT

SEQ ID NO: 135002 - protein, 10 aa, synthetic construct
TQERGDRSQT

SEQ ID NO: 135003 - protein, 10 aa, synthetic construct
TDGRGDRSQT

SEQ ID NO: 135004 - protein, 10 aa, synthetic construct
TDARGDRSQT

SEQ ID NO: 135005 - protein, 10 aa, synthetic construct
TDVRGDRSQT

SEQ ID NO: 135006 - protein, 10 aa, synthetic construct
TDPRGDRSQT

SEQ ID NO: 135007 - protein, 10 aa, synthetic construct
TDLRGDRSQT

SEQ ID NO: 135008 - protein, 10 aa, synthetic construct
TDIRGDRSQT

SEQ ID NO: 135009 - protein, 10 aa, synthetic construct
TDMRGDRSQT

SEQ ID NO: 135010 - protein, 10 aa, synthetic construct
TDWRGDRSQT

SEQ ID NO: 135011 - protein, 10 aa, synthetic construct
TDFRGDRSQT

SEQ ID NO: 135012 - protein, 10 aa, synthetic construct
TDKRGDRSQT

SEQ ID NO: 135013 - protein, 10 aa, synthetic construct
TDRRGDRSQT

SEQ ID NO: 135014 - protein, 10 aa, synthetic construct
TDHRGDRSQT

SEQ ID NO: 135015 - protein, 10 aa, synthetic construct
TDSRGDRSQT

SEQ ID NO: 135016 - protein, 10 aa, synthetic construct
TDTRGDRSQT

SEQ ID NO: 135017 - protein, 10 aa, synthetic construct
TDYRGDRSQT

SEQ ID NO: 135018 - protein, 10 aa, synthetic construct
TDNRGDRSQT

SEQ ID NO: 135019 - protein, 10 aa, synthetic construct
TDQRGDRSQT

SEQ ID NO: 135020 - protein, 10 aa, synthetic construct
TDDRGDRSQT

SEQ ID NO: 135021 - protein, 10 aa, synthetic construct
TDERGDRSQT

SEQ ID NO: 135022 - protein, 10 aa, synthetic construct
TEGRGDRSQT

SEQ ID NO: 135023 - protein, 10 aa, synthetic construct
TEARGDRSQT

SEQ ID NO: 135024 - protein, 10 aa, synthetic construct
TEVRGDRSQT

SEQ ID NO: 135025 - protein, 10 aa, synthetic construct
TEPRGDRSQT

SEQ ID NO: 135026 - protein, 10 aa, synthetic construct
TELRGDRSQT

SEQ ID NO: 135027 - protein, 10 aa, synthetic construct
TEIRGDRSQT

SEQ ID NO: 135028 - protein, 10 aa, synthetic construct
TEMRGDRSQT

SEQ ID NO: 135029 - protein, 10 aa, synthetic construct
TEWRGDRSQT

SEQ ID NO: 135030 - protein, 10 aa, synthetic construct
TEFRGDRSQT

SEQ ID NO: 135031 - protein, 10 aa, synthetic construct
TEKRGDRSQT

SEQ ID NO: 135032 - protein, 10 aa, synthetic construct
TERRGDRSQT

SEQ ID NO: 135033 - protein, 10 aa, synthetic construct
TEHRGDRSQT

SEQ ID NO: 135034 - protein, 10 aa, synthetic construct
TESRGDRSQT

SEQ ID NO: 135035 - protein, 10 aa, synthetic construct
TETRGDRSQT

SEQ ID NO: 135036 - protein, 10 aa, synthetic construct
TEYRGDRSQT

SEQ ID NO: 135037 - protein, 10 aa, synthetic construct
TENRGDRSQT

SEQ ID NO: 135038 - protein, 10 aa, synthetic construct
TEQRGDRSQT

SEQ ID NO: 135039 - protein, 10 aa, synthetic construct
TEDRGDRSQT

SEQ ID NO: 135040 - protein, 10 aa, synthetic construct
TEERGDRSQT

SEQ ID NO: 135041 - protein, 10 aa, synthetic construct
AGGRGDRSQT

SEQ ID NO: 135042 - protein, 10 aa, synthetic construct
AGARGDRSQT

SEQ ID NO: 135043 - protein, 10 aa, synthetic construct
AGVRGDRSQT

SEQ ID NO: 135044 - protein, 10 aa, synthetic construct
AGPRGDRSQT

SEQ ID NO: 135045 - protein, 10 aa, synthetic construct
AGLRGDRSQT

SEQ ID NO: 135046 - protein, 10 aa, synthetic construct
AGIRGDRSQT

SEQ ID NO: 135047 - protein, 10 aa, synthetic construct
AGMRGDRSQT

SEQ ID NO: 135048 - protein, 10 aa, synthetic construct
AGWRGDRSQT

SEQ ID NO: 135049 - protein, 10 aa, synthetic construct
AGFRGDRSQT

SEQ ID NO: 135050 - protein, 10 aa, synthetic construct
AGKRGDRSQT

SEQ ID NO: 135051 - protein, 10 aa, synthetic construct
AGRRGDRSQT

SEQ ID NO: 135052 - protein, 10 aa, synthetic construct
AGHRGDRSQT

SEQ ID NO: 135053 - protein, 10 aa, synthetic construct
AGSRGDRSQT

SEQ ID NO: 135054 - protein, 10 aa, synthetic construct
AGTRGDRSQT

SEQ ID NO: 135055 - protein, 10 aa, synthetic construct
AGYRGDRSQT

SEQ ID NO: 135056 - protein, 10 aa, synthetic construct
AGNRGDRSQT

SEQ ID NO: 135057 - protein, 10 aa, synthetic construct
AGQRGDRSQT

SEQ ID NO: 135058 - protein, 10 aa, synthetic construct
AGDRGDRSQT

SEQ ID NO: 135059 - protein, 10 aa, synthetic construct
AGERGDRSQT

SEQ ID NO: 135060 - protein, 10 aa, synthetic construct
AAGRGDRSQT

SEQ ID NO: 135061 - protein, 10 aa, synthetic construct
AAARGDRSQT

SEQ ID NO: 135062 - protein, 10 aa, synthetic construct
AAVRGDRSQT

SEQ ID NO: 135063 - protein, 10 aa, synthetic construct
AAPRGDRSQT

SEQ ID NO: 135064 - protein, 10 aa, synthetic construct
AALRGDRSQT

SEQ ID NO: 135065 - protein, 10 aa, synthetic construct
AAIRGDRSQT

SEQ ID NO: 135066 - protein, 10 aa, synthetic construct
AAMRGDRSQT

SEQ ID NO: 135067 - protein, 10 aa, synthetic construct
AAWRGDRSQT

SEQ ID NO: 135068 - protein, 10 aa, synthetic construct
AAFRGDRSQT

SEQ ID NO: 135069 - protein, 10 aa, synthetic construct
AAKRGDRSQT

SEQ ID NO: 135070 - protein, 10 aa, synthetic construct
AARRGDRSQT

SEQ ID NO: 135071 - protein, 10 aa, synthetic construct
AAHRGDRSQT

SEQ ID NO: 135072 - protein, 10 aa, synthetic construct
AASRGDRSQT

SEQ ID NO: 135073 - protein, 10 aa, synthetic construct
AATRGDRSQT

SEQ ID NO: 135074 - protein, 10 aa, synthetic construct
AAYRGDRSQT

SEQ ID NO: 135075 - protein, 10 aa, synthetic construct
AANRGDRSQT

SEQ ID NO: 135076 - protein, 10 aa, synthetic construct
AAQRGDRSQT

SEQ ID NO: 135077 - protein, 10 aa, synthetic construct
AADRGDRSQT

SEQ ID NO: 135078 - protein, 10 aa, synthetic construct
AAERGDRSQT

SEQ ID NO: 135079 - protein, 10 aa, synthetic construct
AVGRGDRSQT

SEQ ID NO: 135080 - protein, 10 aa, synthetic construct
AVARGDRSQT

SEQ ID NO: 135081 - protein, 10 aa, synthetic construct
AVVRGDRSQT

SEQ ID NO: 135082 - protein, 10 aa, synthetic construct
AVPRGDRSQT

SEQ ID NO: 135083 - protein, 10 aa, synthetic construct
AVLRGDRSQT

SEQ ID NO: 135084 - protein, 10 aa, synthetic construct
AVIRGDRSQT

SEQ ID NO: 135085 - protein, 10 aa, synthetic construct
AVMRGDRSQT

SEQ ID NO: 135086 - protein, 10 aa, synthetic construct
AVWRGDRSQT

SEQ ID NO: 135087 - protein, 10 aa, synthetic construct
AVFRGDRSQT

SEQ ID NO: 135088 - protein, 10 aa, synthetic construct
AVKRGDRSQT

SEQ ID NO: 135089 - protein, 10 aa, synthetic construct
AVRRGDRSQT

SEQ ID NO: 135090 - protein, 10 aa, synthetic construct
AVHRGDRSQT

SEQ ID NO: 135091 - protein, 10 aa, synthetic construct
AVSRGDRSQT

SEQ ID NO: 135092 - protein, 10 aa, synthetic construct
AVTRGDRSQT

SEQ ID NO: 135093 - protein, 10 aa, synthetic construct
AVYRGDRSQT

SEQ ID NO: 135094 - protein, 10 aa, synthetic construct
AVNRGDRSQT

SEQ ID NO: 135095 - protein, 10 aa, synthetic construct
AVQRGDRSQT

SEQ ID NO: 135096 - protein, 10 aa, synthetic construct
AVDRGDRSQT

SEQ ID NO: 135097 - protein, 10 aa, synthetic construct
AVERGDRSQT

SEQ ID NO: 135098 - protein, 10 aa, synthetic construct
APGRGDRSQT

SEQ ID NO: 135099 - protein, 10 aa, synthetic construct
APARGDRSQT

SEQ ID NO: 135100 - protein, 10 aa, synthetic construct
APVRGDRSQT

SEQ ID NO: 135101 - protein, 10 aa, synthetic construct
APPRGDRSQT

SEQ ID NO: 135102 - protein, 10 aa, synthetic construct
APLRGDRSQT

SEQ ID NO: 135103 - protein, 10 aa, synthetic construct
APIRGDRSQT

SEQ ID NO: 135104 - protein, 10 aa, synthetic construct
APMRGDRSQT

SEQ ID NO: 135105 - protein, 10 aa, synthetic construct
APWRGDRSQT

SEQ ID NO: 135106 - protein, 10 aa, synthetic construct
APFRGDRSQT

SEQ ID NO: 135107 - protein, 10 aa, synthetic construct
APKRGDRSQT

SEQ ID NO: 135108 - protein, 10 aa, synthetic construct
APRRGDRSQT

SEQ ID NO: 135109 - protein, 10 aa, synthetic construct
APHRGDRSQT

SEQ ID NO: 135110 - protein, 10 aa, synthetic construct
APSRGDRSQT

SEQ ID NO: 135111 - protein, 10 aa, synthetic construct
APTRGDRSQT

SEQ ID NO: 135112 - protein, 10 aa, synthetic construct
APYRGDRSQT

SEQ ID NO: 135113 - protein, 10 aa, synthetic construct
APNRGDRSQT

SEQ ID NO: 135114 - protein, 10 aa, synthetic construct
APQRGDRSQT

SEQ ID NO: 135115 - protein, 10 aa, synthetic construct
APDRGDRSQT

SEQ ID NO: 135116 - protein, 10 aa, synthetic construct
APERGDRSQT

SEQ ID NO: 135117 - protein, 10 aa, synthetic construct
ALGRGDRSQT

SEQ ID NO: 135118 - protein, 10 aa, synthetic construct
ALARGDRSQT

SEQ ID NO: 135119 - protein, 10 aa, synthetic construct
ALVRGDRSQT

SEQ ID NO: 135120 - protein, 10 aa, synthetic construct
ALPRGDRSQT

SEQ ID NO: 135121 - protein, 10 aa, synthetic construct
ALLRGDRSQT

SEQ ID NO: 135122 - protein, 10 aa, synthetic construct
ALIRGDRSQT

SEQ ID NO: 135123 - protein, 10 aa, synthetic construct
ALMRGDRSQT

SEQ ID NO: 135124 - protein, 10 aa, synthetic construct
ALWRGDRSQT

SEQ ID NO: 135125 - protein, 10 aa, synthetic construct
ALFRGDRSQT

SEQ ID NO: 135126 - protein, 10 aa, synthetic construct
ALKRGDRSQT

SEQ ID NO: 135127 - protein, 10 aa, synthetic construct
ALRRGDRSQT

SEQ ID NO: 135128 - protein, 10 aa, synthetic construct
ALHRGDRSQT

SEQ ID NO: 135129 - protein, 10 aa, synthetic construct
ALSRGDRSQT

SEQ ID NO: 135130 - protein, 10 aa, synthetic construct
ALTRGDRSQT

SEQ ID NO: 135131 - protein, 10 aa, synthetic construct
ALYRGDRSQT

SEQ ID NO: 135132 - protein, 10 aa, synthetic construct
ALNRGDRSQT

SEQ ID NO: 135133 - protein, 10 aa, synthetic construct
ALQRGDRSQT

SEQ ID NO: 135134 - protein, 10 aa, synthetic construct
ALDRGDRSQT

SEQ ID NO: 135135 - protein, 10 aa, synthetic construct
ALERGDRSQT

SEQ ID NO: 135136 - protein, 10 aa, synthetic construct
AIGRGDRSQT

SEQ ID NO: 135137 - protein, 10 aa, synthetic construct
AIARGDRSQT

SEQ ID NO: 135138 - protein, 10 aa, synthetic construct
AIVRGDRSQT

SEQ ID NO: 135139 - protein, 10 aa, synthetic construct
AIPRGDRSQT

SEQ ID NO: 135140 - protein, 10 aa, synthetic construct
AILRGDRSQT

SEQ ID NO: 135141 - protein, 10 aa, synthetic construct
AIIRGDRSQT

SEQ ID NO: 135142 - protein, 10 aa, synthetic construct
AIMRGDRSQT

SEQ ID NO: 135143 - protein, 10 aa, synthetic construct
AIWRGDRSQT

SEQ ID NO: 135144 - protein, 10 aa, synthetic construct
AIFRGDRSQT

SEQ ID NO: 135145 - protein, 10 aa, synthetic construct
AIKRGDRSQT

SEQ ID NO: 135146 - protein, 10 aa, synthetic construct
AIRRGDRSQT

SEQ ID NO: 135147 - protein, 10 aa, synthetic construct
AIHRGDRSQT

SEQ ID NO: 135148 - protein, 10 aa, synthetic construct
AISRGDRSQT

SEQ ID NO: 135149 - protein, 10 aa, synthetic construct
AITRGDRSQT

SEQ ID NO: 135150 - protein, 10 aa, synthetic construct
AIYRGDRSQT

SEQ ID NO: 135151 - protein, 10 aa, synthetic construct
AINRGDRSQT

SEQ ID NO: 135152 - protein, 10 aa, synthetic construct
AIQRGDRSQT

SEQ ID NO: 135153 - protein, 10 aa, synthetic construct
AIDRGDRSQT

SEQ ID NO: 135154 - protein, 10 aa, synthetic construct
AIERGDRSQT

SEQ ID NO: 135155 - protein, 10 aa, synthetic construct
AMGRGDRSQT

SEQ ID NO: 135156 - protein, 10 aa, synthetic construct
AMARGDRSQT

SEQ ID NO: 135157 - protein, 10 aa, synthetic construct
AMVRGDRSQT

SEQ ID NO: 135158 - protein, 10 aa, synthetic construct
AMPRGDRSQT

SEQ ID NO: 135159 - protein, 10 aa, synthetic construct
AMLRGDRSQT

SEQ ID NO: 135160 - protein, 10 aa, synthetic construct
AMIRGDRSQT

SEQ ID NO: 135161 - protein, 10 aa, synthetic construct
AMMRGDRSQT

SEQ ID NO: 135162 - protein, 10 aa, synthetic construct
AMWRGDRSQT

SEQ ID NO: 135163 - protein, 10 aa, synthetic construct
AMFRGDRSQT

SEQ ID NO: 135164 - protein, 10 aa, synthetic construct
AMKRGDRSQT

SEQ ID NO: 135165 - protein, 10 aa, synthetic construct
AMRRGDRSQT

SEQ ID NO: 135166 - protein, 10 aa, synthetic construct
AMHRGDRSQT

SEQ ID NO: 135167 - protein, 10 aa, synthetic construct
AMSRGDRSQT

SEQ ID NO: 135168 - protein, 10 aa, synthetic construct
AMTRGDRSQT

SEQ ID NO: 135169 - protein, 10 aa, synthetic construct
AMYRGDRSQT

SEQ ID NO: 135170 - protein, 10 aa, synthetic construct
AMNRGDRSQT

SEQ ID NO: 135171 - protein, 10 aa, synthetic construct
AMQRGDRSQT

SEQ ID NO: 135172 - protein, 10 aa, synthetic construct
AMDRGDRSQT

SEQ ID NO: 135173 - protein, 10 aa, synthetic construct
AMERGDRSQT

SEQ ID NO: 135174 - protein, 10 aa, synthetic construct
AWGRGDRSQT

SEQ ID NO: 135175 - protein, 10 aa, synthetic construct
AWARGDRSQT

SEQ ID NO: 135176 - protein, 10 aa, synthetic construct
AWVRGDRSQT

SEQ ID NO: 135177 - protein, 10 aa, synthetic construct
AWPRGDRSQT

SEQ ID NO: 135178 - protein, 10 aa, synthetic construct
AWLRGDRSQT

SEQ ID NO: 135179 - protein, 10 aa, synthetic construct
AWIRGDRSQT

SEQ ID NO: 135180 - protein, 10 aa, synthetic construct
AWMRGDRSQT

SEQ ID NO: 135181 - protein, 10 aa, synthetic construct
AWWRGDRSQT

SEQ ID NO: 135182 - protein, 10 aa, synthetic construct
AWFRGDRSQT

SEQ ID NO: 135183 - protein, 10 aa, synthetic construct
AWKRGDRSQT

SEQ ID NO: 135184 - protein, 10 aa, synthetic construct
AWRRGDRSQT

SEQ ID NO: 135185 - protein, 10 aa, synthetic construct
AWHRGDRSQT

SEQ ID NO: 135186 - protein, 10 aa, synthetic construct
AWSRGDRSQT

SEQ ID NO: 135187 - protein, 10 aa, synthetic construct
AWTRGDRSQT

SEQ ID NO: 135188 - protein, 10 aa, synthetic construct
AWYRGDRSQT

SEQ ID NO: 135189 - protein, 10 aa, synthetic construct
AWNRGDRSQT

SEQ ID NO: 135190 - protein, 10 aa, synthetic construct
AWQRGDRSQT

SEQ ID NO: 135191 - protein, 10 aa, synthetic construct
AWDRGDRSQT

SEQ ID NO: 135192 - protein, 10 aa, synthetic construct
AWERGDRSQT

SEQ ID NO: 135193 - protein, 10 aa, synthetic construct
AFGRGDRSQT

SEQ ID NO: 135194 - protein, 10 aa, synthetic construct
AFARGDRSQT

SEQ ID NO: 135195 - protein, 10 aa, synthetic construct
AFVRGDRSQT

SEQ ID NO: 135196 - protein, 10 aa, synthetic construct
AFPRGDRSQT

SEQ ID NO: 135197 - protein, 10 aa, synthetic construct
AFLRGDRSQT

SEQ ID NO: 135198 - protein, 10 aa, synthetic construct
AFIRGDRSQT

SEQ ID NO: 135199 - protein, 10 aa, synthetic construct
AFMRGDRSQT

SEQ ID NO: 135200 - protein, 10 aa, synthetic construct
AFWRGDRSQT

SEQ ID NO: 135201 - protein, 10 aa, synthetic construct
AFFRGDRSQT

SEQ ID NO: 135202 - protein, 10 aa, synthetic construct
AFKRGDRSQT

SEQ ID NO: 135203 - protein, 10 aa, synthetic construct
AFRRGDRSQT

SEQ ID NO: 135204 - protein, 10 aa, synthetic construct
AFHRGDRSQT

SEQ ID NO: 135205 - protein, 10 aa, synthetic construct
AFSRGDRSQT

SEQ ID NO: 135206 - protein, 10 aa, synthetic construct
AFTRGDRSQT

SEQ ID NO: 135207 - protein, 10 aa, synthetic construct
AFYRGDRSQT

SEQ ID NO: 135208 - protein, 10 aa, synthetic construct
AFNRGDRSQT

SEQ ID NO: 135209 - protein, 10 aa, synthetic construct
AFQRGDRSQT

SEQ ID NO: 135210 - protein, 10 aa, synthetic construct
AFDRGDRSQT

SEQ ID NO: 135211 - protein, 10 aa, synthetic construct
AFERGDRSQT

SEQ ID NO: 135212 - protein, 10 aa, synthetic construct
AKGRGDRSQT

SEQ ID NO: 135213 - protein, 10 aa, synthetic construct
AKARGDRSQT

SEQ ID NO: 135214 - protein, 10 aa, synthetic construct
AKVRGDRSQT

SEQ ID NO: 135215 - protein, 10 aa, synthetic construct
AKPRGDRSQT

SEQ ID NO: 135216 - protein, 10 aa, synthetic construct
AKLRGDRSQT

SEQ ID NO: 135217 - protein, 10 aa, synthetic construct
AKIRGDRSQT

SEQ ID NO: 135218 - protein, 10 aa, synthetic construct
AKMRGDRSQT

SEQ ID NO: 135219 - protein, 10 aa, synthetic construct
AKWRGDRSQT

SEQ ID NO: 135220 - protein, 10 aa, synthetic construct
AKFRGDRSQT

SEQ ID NO: 135221 - protein, 10 aa, synthetic construct
AKKRGDRSQT

SEQ ID NO: 135222 - protein, 10 aa, synthetic construct
AKRRGDRSQT

SEQ ID NO: 135223 - protein, 10 aa, synthetic construct
AKHRGDRSQT

SEQ ID NO: 135224 - protein, 10 aa, synthetic construct
AKSRGDRSQT

SEQ ID NO: 135225 - protein, 10 aa, synthetic construct
AKTRGDRSQT

SEQ ID NO: 135226 - protein, 10 aa, synthetic construct
AKYRGDRSQT

SEQ ID NO: 135227 - protein, 10 aa, synthetic construct
AKNRGDRSQT

SEQ ID NO: 135228 - protein, 10 aa, synthetic construct
AKQRGDRSQT

SEQ ID NO: 135229 - protein, 10 aa, synthetic construct
AKDRGDRSQT

SEQ ID NO: 135230 - protein, 10 aa, synthetic construct
AKERGDRSQT

SEQ ID NO: 135231 - protein, 10 aa, synthetic construct
ARGRGDRSQT

SEQ ID NO: 135232 - protein, 10 aa, synthetic construct
ARARGDRSQT

SEQ ID NO: 135233 - protein, 10 aa, synthetic construct
ARVRGDRSQT

SEQ ID NO: 135234 - protein, 10 aa, synthetic construct
ARPRGDRSQT

SEQ ID NO: 135235 - protein, 10 aa, synthetic construct
ARLRGDRSQT

SEQ ID NO: 135236 - protein, 10 aa, synthetic construct
ARIRGDRSQT

SEQ ID NO: 135237 - protein, 10 aa, synthetic construct
ARMRGDRSQT

SEQ ID NO: 135238 - protein, 10 aa, synthetic construct
ARWRGDRSQT

SEQ ID NO: 135239 - protein, 10 aa, synthetic construct
ARFRGDRSQT

SEQ ID NO: 135240 - protein, 10 aa, synthetic construct
ARKRGDRSQT

SEQ ID NO: 135241 - protein, 10 aa, synthetic construct
ARRRGDRSQT

SEQ ID NO: 135242 - protein, 10 aa, synthetic construct
ARHRGDRSQT

SEQ ID NO: 135243 - protein, 10 aa, synthetic construct
ARSRGDRSQT

SEQ ID NO: 135244 - protein, 10 aa, synthetic construct
ARTRGDRSQT

SEQ ID NO: 135245 - protein, 10 aa, synthetic construct
ARYRGDRSQT

SEQ ID NO: 135246 - protein, 10 aa, synthetic construct
ARNRGDRSQT

SEQ ID NO: 135247 - protein, 10 aa, synthetic construct
ARQRGDRSQT

SEQ ID NO: 135248 - protein, 10 aa, synthetic construct
ARDRGDRSQT

SEQ ID NO: 135249 - protein, 10 aa, synthetic construct
ARERGDRSQT

SEQ ID NO: 135250 - protein, 10 aa, synthetic construct
AHGRGDRSQT

SEQ ID NO: 135251 - protein, 10 aa, synthetic construct
AHARGDRSQT

SEQ ID NO: 135252 - protein, 10 aa, synthetic construct
AHVRGDRSQT

SEQ ID NO: 135253 - protein, 10 aa, synthetic construct
AHPRGDRSQT

SEQ ID NO: 135254 - protein, 10 aa, synthetic construct
AHLRGDRSQT

SEQ ID NO: 135255 - protein, 10 aa, synthetic construct
AHIRGDRSQT

SEQ ID NO: 135256 - protein, 10 aa, synthetic construct
AHMRGDRSQT

SEQ ID NO: 135257 - protein, 10 aa, synthetic construct
AHWRGDRSQT

SEQ ID NO: 135258 - protein, 10 aa, synthetic construct
AHFRGDRSQT

SEQ ID NO: 135259 - protein, 10 aa, synthetic construct
AHKRGDRSQT

SEQ ID NO: 135260 - protein, 10 aa, synthetic construct
AHRRGDRSQT

SEQ ID NO: 135261 - protein, 10 aa, synthetic construct
AHHRGDRSQT

SEQ ID NO: 135262 - protein, 10 aa, synthetic construct
AHSRGDRSQT

SEQ ID NO: 135263 - protein, 10 aa, synthetic construct
AHTRGDRSQT

SEQ ID NO: 135264 - protein, 10 aa, synthetic construct
AHYRGDRSQT

SEQ ID NO: 135265 - protein, 10 aa, synthetic construct
AHNRGDRSQT

SEQ ID NO: 135266 - protein, 10 aa, synthetic construct
AHQRGDRSQT

SEQ ID NO: 135267 - protein, 10 aa, synthetic construct
AHDRGDRSQT

SEQ ID NO: 135268 - protein, 10 aa, synthetic construct
AHERGDRSQT

SEQ ID NO: 135269 - protein, 10 aa, synthetic construct
ASGRGDRSQT

SEQ ID NO: 135270 - protein, 10 aa, synthetic construct
ASARGDRSQT

SEQ ID NO: 135271 - protein, 10 aa, synthetic construct
ASVRGDRSQT

SEQ ID NO: 135272 - protein, 10 aa, synthetic construct
ASPRGDRSQT

SEQ ID NO: 135273 - protein, 10 aa, synthetic construct
ASLRGDRSQT

SEQ ID NO: 135274 - protein, 10 aa, synthetic construct
ASIRGDRSQT

SEQ ID NO: 135275 - protein, 10 aa, synthetic construct
ASMRGDRSQT

SEQ ID NO: 135276 - protein, 10 aa, synthetic construct
ASWRGDRSQT

SEQ ID NO: 135277 - protein, 10 aa, synthetic construct
ASFRGDRSQT

SEQ ID NO: 135278 - protein, 10 aa, synthetic construct
ASKRGDRSQT

SEQ ID NO: 135279 - protein, 10 aa, synthetic construct
ASRRGDRSQT

SEQ ID NO: 135280 - protein, 10 aa, synthetic construct
ASHRGDRSQT

SEQ ID NO: 135281 - protein, 10 aa, synthetic construct
ASSRGDRSQT

SEQ ID NO: 135282 - protein, 10 aa, synthetic construct
ASTRGDRSQT

SEQ ID NO: 135283 - protein, 10 aa, synthetic construct
ASYRGDRSQT

SEQ ID NO: 135284 - protein, 10 aa, synthetic construct
ASNRGDRSQT

SEQ ID NO: 135285 - protein, 10 aa, synthetic construct
ASQRGDRSQT

SEQ ID NO: 135286 - protein, 10 aa, synthetic construct
ASDRGDRSQT

SEQ ID NO: 135287 - protein, 10 aa, synthetic construct
ASERGDRSQT

SEQ ID NO: 135288 - protein, 10 aa, synthetic construct
ATGRGDRSQT

SEQ ID NO: 135289 - protein, 10 aa, synthetic construct
ATARGDRSQT

SEQ ID NO: 135290 - protein, 10 aa, synthetic construct
ATVRGDRSQT

SEQ ID NO: 135291 - protein, 10 aa, synthetic construct
ATPRGDRSQT

SEQ ID NO: 135292 - protein, 10 aa, synthetic construct
ATLRGDRSQT

SEQ ID NO: 135293 - protein, 10 aa, synthetic construct
ATIRGDRSQT

SEQ ID NO: 135294 - protein, 10 aa, synthetic construct
ATMRGDRSQT

SEQ ID NO: 135295 - protein, 10 aa, synthetic construct
ATWRGDRSQT

SEQ ID NO: 135296 - protein, 10 aa, synthetic construct
ATFRGDRSQT

SEQ ID NO: 135297 - protein, 10 aa, synthetic construct
ATKRGDRSQT

SEQ ID NO: 135298 - protein, 10 aa, synthetic construct
ATRRGDRSQT

SEQ ID NO: 135299 - protein, 10 aa, synthetic construct
ATHRGDRSQT

SEQ ID NO: 135300 - protein, 10 aa, synthetic construct
ATSRGDRSQT

SEQ ID NO: 135301 - protein, 10 aa, synthetic construct
ATTRGDRSQT

SEQ ID NO: 135302 - protein, 10 aa, synthetic construct
ATYRGDRSQT

SEQ ID NO: 135303 - protein, 10 aa, synthetic construct
ATNRGDRSQT

SEQ ID NO: 135304 - protein, 10 aa, synthetic construct
ATQRGDRSQT

SEQ ID NO: 135305 - protein, 10 aa, synthetic construct
ATDRGDRSQT

SEQ ID NO: 135306 - protein, 10 aa, synthetic construct
ATERGDRSQT

SEQ ID NO: 135307 - protein, 10 aa, synthetic construct
AYGRGDRSQT

SEQ ID NO: 135308 - protein, 10 aa, synthetic construct
AYARGDRSQT

SEQ ID NO: 135309 - protein, 10 aa, synthetic construct
AYVRGDRSQT

SEQ ID NO: 135310 - protein, 10 aa, synthetic construct
AYPRGDRSQT

SEQ ID NO: 135311 - protein, 10 aa, synthetic construct
AYLRGDRSQT

SEQ ID NO: 135312 - protein, 10 aa, synthetic construct
AYIRGDRSQT

SEQ ID NO: 135313 - protein, 10 aa, synthetic construct
AYMRGDRSQT

SEQ ID NO: 135314 - protein, 10 aa, synthetic construct
AYWRGDRSQT

SEQ ID NO: 135315 - protein, 10 aa, synthetic construct
AYFRGDRSQT

SEQ ID NO: 135316 - protein, 10 aa, synthetic construct
AYKRGDRSQT

SEQ ID NO: 135317 - protein, 10 aa, synthetic construct
AYRRGDRSQT

SEQ ID NO: 135318 - protein, 10 aa, synthetic construct
AYHRGDRSQT

SEQ ID NO: 135319 - protein, 10 aa, synthetic construct
AYSRGDRSQT

SEQ ID NO: 135320 - protein, 10 aa, synthetic construct
AYTRGDRSQT

SEQ ID NO: 135321 - protein, 10 aa, synthetic construct
AYYRGDRSQT

SEQ ID NO: 135322 - protein, 10 aa, synthetic construct
AYNRGDRSQT

SEQ ID NO: 135323 - protein, 10 aa, synthetic construct
AYQRGDRSQT

SEQ ID NO: 135324 - protein, 10 aa, synthetic construct
AYDRGDRSQT

SEQ ID NO: 135325 - protein, 10 aa, synthetic construct
AYERGDRSQT

SEQ ID NO: 135326 - protein, 10 aa, synthetic construct
ANGRGDRSQT

SEQ ID NO: 135327 - protein, 10 aa, synthetic construct
ANARGDRSQT

SEQ ID NO: 135328 - protein, 10 aa, synthetic construct
ANVRGDRSQT

SEQ ID NO: 135329 - protein, 10 aa, synthetic construct
ANPRGDRSQT

SEQ ID NO: 135330 - protein, 10 aa, synthetic construct
ANLRGDRSQT

SEQ ID NO: 135331 - protein, 10 aa, synthetic construct
ANIRGDRSQT

SEQ ID NO: 135332 - protein, 10 aa, synthetic construct
ANMRGDRSQT

SEQ ID NO: 135333 - protein, 10 aa, synthetic construct
ANWRGDRSQT

SEQ ID NO: 135334 - protein, 10 aa, synthetic construct
ANFRGDRSQT

SEQ ID NO: 135335 - protein, 10 aa, synthetic construct
ANKRGDRSQT

SEQ ID NO: 135336 - protein, 10 aa, synthetic construct
ANRRGDRSQT

SEQ ID NO: 135337 - protein, 10 aa, synthetic construct
ANHRGDRSQT

SEQ ID NO: 135338 - protein, 10 aa, synthetic construct
ANSRGDRSQT

SEQ ID NO: 135339 - protein, 10 aa, synthetic construct
ANTRGDRSQT

SEQ ID NO: 135340 - protein, 10 aa, synthetic construct
ANYRGDRSQT

SEQ ID NO: 135341 - protein, 10 aa, synthetic construct
ANNRGDRSQT

SEQ ID NO: 135342 - protein, 10 aa, synthetic construct
ANQRGDRSQT

SEQ ID NO: 135343 - protein, 10 aa, synthetic construct
ANDRGDRSQT

SEQ ID NO: 135344 - protein, 10 aa, synthetic construct
ANERGDRSQT

SEQ ID NO: 135345 - protein, 10 aa, synthetic construct
AQGRGDRSQT

SEQ ID NO: 135346 - protein, 10 aa, synthetic construct
AQARGDRSQT

SEQ ID NO: 135347 - protein, 10 aa, synthetic construct
AQVRGDRSQT

SEQ ID NO: 135348 - protein, 10 aa, synthetic construct
AQPRGDRSQT

SEQ ID NO: 135349 - protein, 10 aa, synthetic construct
AQLRGDRSQT

SEQ ID NO: 135350 - protein, 10 aa, synthetic construct
AQIRGDRSQT

SEQ ID NO: 135351 - protein, 10 aa, synthetic construct
AQMRGDRSQT

SEQ ID NO: 135352 - protein, 10 aa, synthetic construct
AQWRGDRSQT

SEQ ID NO: 135353 - protein, 10 aa, synthetic construct
AQFRGDRSQT

SEQ ID NO: 135354 - protein, 10 aa, synthetic construct
AQKRGDRSQT

SEQ ID NO: 135355 - protein, 10 aa, synthetic construct
AQRRGDRSQT

SEQ ID NO: 135356 - protein, 10 aa, synthetic construct
AQHRGDRSQT

SEQ ID NO: 135357 - protein, 10 aa, synthetic construct
AQSRGDRSQT

SEQ ID NO: 135358 - protein, 10 aa, synthetic construct
AQTRGDRSQT

SEQ ID NO: 135359 - protein, 10 aa, synthetic construct
AQYRGDRSQT

SEQ ID NO: 135360 - protein, 10 aa, synthetic construct
AQNRGDRSQT

SEQ ID NO: 135361 - protein, 10 aa, synthetic construct
AQQRGDRSQT

SEQ ID NO: 135362 - protein, 10 aa, synthetic construct
AQDRGDRSQT

SEQ ID NO: 135363 - protein, 10 aa, synthetic construct
AQERGDRSQT

SEQ ID NO: 135364 - protein, 10 aa, synthetic construct
ADGRGDRSQT

SEQ ID NO: 135365 - protein, 10 aa, synthetic construct
ADARGDRSQT

SEQ ID NO: 135366 - protein, 10 aa, synthetic construct
ADVRGDRSQT

SEQ ID NO: 135367 - protein, 10 aa, synthetic construct
ADPRGDRSQT

SEQ ID NO: 135368 - protein, 10 aa, synthetic construct
ADLRGDRSQT

SEQ ID NO: 135369 - protein, 10 aa, synthetic construct
ADIRGDRSQT

SEQ ID NO: 135370 - protein, 10 aa, synthetic construct
ADMRGDRSQT

SEQ ID NO: 135371 - protein, 10 aa, synthetic construct
ADWRGDRSQT

SEQ ID NO: 135372 - protein, 10 aa, synthetic construct
ADFRGDRSQT

SEQ ID NO: 135373 - protein, 10 aa, synthetic construct
ADKRGDRSQT

SEQ ID NO: 135374 - protein, 10 aa, synthetic construct
ADRRGDRSQT

SEQ ID NO: 135375 - protein, 10 aa, synthetic construct
ADHRGDRSQT

SEQ ID NO: 135376 - protein, 10 aa, synthetic construct
ADSRGDRSQT

SEQ ID NO: 135377 - protein, 10 aa, synthetic construct
ADTRGDRSQT

SEQ ID NO: 135378 - protein, 10 aa, synthetic construct
ADYRGDRSQT

SEQ ID NO: 135379 - protein, 10 aa, synthetic construct
ADNRGDRSQT

SEQ ID NO: 135380 - protein, 10 aa, synthetic construct
ADQRGDRSQT

SEQ ID NO: 135381 - protein, 10 aa, synthetic construct
ADDRGDRSQT

SEQ ID NO: 135382 - protein, 10 aa, synthetic construct
ADERGDRSQT

SEQ ID NO: 135383 - protein, 10 aa, synthetic construct
AEGRGDRSQT

SEQ ID NO: 135384 - protein, 10 aa, synthetic construct
AEARGDRSQT

SEQ ID NO: 135385 - protein, 10 aa, synthetic construct
AEVRGDRSQT

SEQ ID NO: 135386 - protein, 10 aa, synthetic construct
AEPRGDRSQT

SEQ ID NO: 135387 - protein, 10 aa, synthetic construct
AELRGDRSQT

SEQ ID NO: 135388 - protein, 10 aa, synthetic construct
AEIRGDRSQT

SEQ ID NO: 135389 - protein, 10 aa, synthetic construct
AEMRGDRSQT

SEQ ID NO: 135390 - protein, 10 aa, synthetic construct
AEWRGDRSQT

SEQ ID NO: 135391 - protein, 10 aa, synthetic construct
AEFRGDRSQT

SEQ ID NO: 135392 - protein, 10 aa, synthetic construct
AEKRGDRSQT

SEQ ID NO: 135393 - protein, 10 aa, synthetic construct
AERRGDRSQT

SEQ ID NO: 135394 - protein, 10 aa, synthetic construct
AEHRGDRSQT

SEQ ID NO: 135395 - protein, 10 aa, synthetic construct
AESRGDRSQT

SEQ ID NO: 135396 - protein, 10 aa, synthetic construct
AETRGDRSQT

SEQ ID NO: 135397 - protein, 10 aa, synthetic construct
AEYRGDRSQT

SEQ ID NO: 135398 - protein, 10 aa, synthetic construct
AENRGDRSQT

SEQ ID NO: 135399 - protein, 10 aa, synthetic construct
AEQRGDRSQT

SEQ ID NO: 135400 - protein, 10 aa, synthetic construct
AEDRGDRSQT

SEQ ID NO: 135401 - protein, 10 aa, synthetic construct
AEERGDRSQT

SEQ ID NO: 135402 - protein, 10 aa, synthetic construct
EGGRGDRSQT

SEQ ID NO: 135403 - protein, 10 aa, synthetic construct
EGARGDRSQT

SEQ ID NO: 135404 - protein, 10 aa, synthetic construct
EGVRGDRSQT

SEQ ID NO: 135405 - protein, 10 aa, synthetic construct
EGPRGDRSQT

SEQ ID NO: 135406 - protein, 10 aa, synthetic construct
EGLRGDRSQT

SEQ ID NO: 135407 - protein, 10 aa, synthetic construct
EGIRGDRSQT

SEQ ID NO: 135408 - protein, 10 aa, synthetic construct
EGMRGDRSQT

SEQ ID NO: 135409 - protein, 10 aa, synthetic construct
EGWRGDRSQT

SEQ ID NO: 135410 - protein, 10 aa, synthetic construct
EGFRGDRSQT

SEQ ID NO: 135411 - protein, 10 aa, synthetic construct
EGKRGDRSQT

SEQ ID NO: 135412 - protein, 10 aa, synthetic construct
EGRRGDRSQT

SEQ ID NO: 135413 - protein, 10 aa, synthetic construct
EGHRGDRSQT

SEQ ID NO: 135414 - protein, 10 aa, synthetic construct
EGSRGDRSQT

SEQ ID NO: 135415 - protein, 10 aa, synthetic construct
EGTRGDRSQT

SEQ ID NO: 135416 - protein, 10 aa, synthetic construct
EGYRGDRSQT

SEQ ID NO: 135417 - protein, 10 aa, synthetic construct
EGNRGDRSQT

SEQ ID NO: 135418 - protein, 10 aa, synthetic construct
EGQRGDRSQT

SEQ ID NO: 135419 - protein, 10 aa, synthetic construct
EGDRGDRSQT

SEQ ID NO: 135420 - protein, 10 aa, synthetic construct
EGERGDRSQT

SEQ ID NO: 135421 - protein, 10 aa, synthetic construct
EAGRGDRSQT

SEQ ID NO: 135422 - protein, 10 aa, synthetic construct
EAARGDRSQT

SEQ ID NO: 135423 - protein, 10 aa, synthetic construct
EAVRGDRSQT

SEQ ID NO: 135424 - protein, 10 aa, synthetic construct
EAPRGDRSQT

SEQ ID NO: 135425 - protein, 10 aa, synthetic construct
EALRGDRSQT

SEQ ID NO: 135426 - protein, 10 aa, synthetic construct
EAIRGDRSQT

SEQ ID NO: 135427 - protein, 10 aa, synthetic construct
EAMRGDRSQT

SEQ ID NO: 135428 - protein, 10 aa, synthetic construct
EAWRGDRSQT

SEQ ID NO: 135429 - protein, 10 aa, synthetic construct
EAFRGDRSQT

SEQ ID NO: 135430 - protein, 10 aa, synthetic construct
EAKRGDRSQT

SEQ ID NO: 135431 - protein, 10 aa, synthetic construct
EARRGDRSQT

SEQ ID NO: 135432 - protein, 10 aa, synthetic construct
EAHRGDRSQT

SEQ ID NO: 135433 - protein, 10 aa, synthetic construct
EASRGDRSQT

SEQ ID NO: 135434 - protein, 10 aa, synthetic construct
EATRGDRSQT

SEQ ID NO: 135435 - protein, 10 aa, synthetic construct
EAYRGDRSQT

SEQ ID NO: 135436 - protein, 10 aa, synthetic construct
EANRGDRSQT

SEQ ID NO: 135437 - protein, 10 aa, synthetic construct
EAQRGDRSQT

SEQ ID NO: 135438 - protein, 10 aa, synthetic construct
EADRGDRSQT

SEQ ID NO: 135439 - protein, 10 aa, synthetic construct
EAERGDRSQT

SEQ ID NO: 135440 - protein, 10 aa, synthetic construct
EVGRGDRSQT

SEQ ID NO: 135441 - protein, 10 aa, synthetic construct
EVARGDRSQT

SEQ ID NO: 135442 - protein, 10 aa, synthetic construct
EVVRGDRSQT

SEQ ID NO: 135443 - protein, 10 aa, synthetic construct
EVPRGDRSQT

SEQ ID NO: 135444 - protein, 10 aa, synthetic construct
EVLRGDRSQT

SEQ ID NO: 135445 - protein, 10 aa, synthetic construct
EVIRGDRSQT

SEQ ID NO: 135446 - protein, 10 aa, synthetic construct
EVMRGDRSQT

SEQ ID NO: 135447 - protein, 10 aa, synthetic construct
EVWRGDRSQT

SEQ ID NO: 135448 - protein, 10 aa, synthetic construct
EVFRGDRSQT

SEQ ID NO: 135449 - protein, 10 aa, synthetic construct
EVKRGDRSQT

SEQ ID NO: 135450 - protein, 10 aa, synthetic construct
EVRRGDRSQT

SEQ ID NO: 135451 - protein, 10 aa, synthetic construct
EVHRGDRSQT

SEQ ID NO: 135452 - protein, 10 aa, synthetic construct
EVSRGDRSQT

SEQ ID NO: 135453 - protein, 10 aa, synthetic construct
EVTRGDRSQT

SEQ ID NO: 135454 - protein, 10 aa, synthetic construct
EVYRGDRSQT

SEQ ID NO: 135455 - protein, 10 aa, synthetic construct
EVNRGDRSQT

SEQ ID NO: 135456 - protein, 10 aa, synthetic construct
EVQRGDRSQT

SEQ ID NO: 135457 - protein, 10 aa, synthetic construct
EVDRGDRSQT

SEQ ID NO: 135458 - protein, 10 aa, synthetic construct
EVERGDRSQT

SEQ ID NO: 135459 - protein, 10 aa, synthetic construct
EPGRGDRSQT

SEQ ID NO: 135460 - protein, 10 aa, synthetic construct
EPARGDRSQT

SEQ ID NO: 135461 - protein, 10 aa, synthetic construct
EPVRGDRSQT

SEQ ID NO: 135462 - protein, 10 aa, synthetic construct
EPPRGDRSQT

SEQ ID NO: 135463 - protein, 10 aa, synthetic construct
EPLRGDRSQT

SEQ ID NO: 135464 - protein, 10 aa, synthetic construct
EPIRGDRSQT

SEQ ID NO: 135465 - protein, 10 aa, synthetic construct
EPMRGDRSQT

SEQ ID NO: 135466 - protein, 10 aa, synthetic construct
EPWRGDRSQT

SEQ ID NO: 135467 - protein, 10 aa, synthetic construct
EPFRGDRSQT

SEQ ID NO: 135468 - protein, 10 aa, synthetic construct
EPKRGDRSQT

SEQ ID NO: 135469 - protein, 10 aa, synthetic construct
EPRRGDRSQT

SEQ ID NO: 135470 - protein, 10 aa, synthetic construct
EPHRGDRSQT

SEQ ID NO: 135471 - protein, 10 aa, synthetic construct
EPSRGDRSQT

SEQ ID NO: 135472 - protein, 10 aa, synthetic construct
EPTRGDRSQT

SEQ ID NO: 135473 - protein, 10 aa, synthetic construct
EPYRGDRSQT

SEQ ID NO: 135474 - protein, 10 aa, synthetic construct
EPNRGDRSQT

SEQ ID NO: 135475 - protein, 10 aa, synthetic construct
EPQRGDRSQT

SEQ ID NO: 135476 - protein, 10 aa, synthetic construct
EPDRGDRSQT

SEQ ID NO: 135477 - protein, 10 aa, synthetic construct
EPERGDRSQT

SEQ ID NO: 135478 - protein, 10 aa, synthetic construct
ELGRGDRSQT

SEQ ID NO: 135479 - protein, 10 aa, synthetic construct
ELARGDRSQT

SEQ ID NO: 135480 - protein, 10 aa, synthetic construct
ELVRGDRSQT

SEQ ID NO: 135481 - protein, 10 aa, synthetic construct
ELPRGDRSQT

SEQ ID NO: 135482 - protein, 10 aa, synthetic construct
ELLRGDRSQT

SEQ ID NO: 135483 - protein, 10 aa, synthetic construct
ELIRGDRSQT

SEQ ID NO: 135484 - protein, 10 aa, synthetic construct
ELMRGDRSQT

SEQ ID NO: 135485 - protein, 10 aa, synthetic construct
ELWRGDRSQT

SEQ ID NO: 135486 - protein, 10 aa, synthetic construct
ELFRGDRSQT

SEQ ID NO: 135487 - protein, 10 aa, synthetic construct
ELKRGDRSQT

SEQ ID NO: 135488 - protein, 10 aa, synthetic construct
ELRRGDRSQT

SEQ ID NO: 135489 - protein, 10 aa, synthetic construct
ELHRGDRSQT

SEQ ID NO: 135490 - protein, 10 aa, synthetic construct
ELSRGDRSQT

SEQ ID NO: 135491 - protein, 10 aa, synthetic construct
ELTRGDRSQT

SEQ ID NO: 135492 - protein, 10 aa, synthetic construct
ELYRGDRSQT

SEQ ID NO: 135493 - protein, 10 aa, synthetic construct
ELNRGDRSQT

SEQ ID NO: 135494 - protein, 10 aa, synthetic construct
ELQRGDRSQT

SEQ ID NO: 135495 - protein, 10 aa, synthetic construct
ELDRGDRSQT

SEQ ID NO: 135496 - protein, 10 aa, synthetic construct
ELERGDRSQT

SEQ ID NO: 135497 - protein, 10 aa, synthetic construct
EIGRGDRSQT

SEQ ID NO: 135498 - protein, 10 aa, synthetic construct
EIARGDRSQT

SEQ ID NO: 135499 - protein, 10 aa, synthetic construct
EIVRGDRSQT

SEQ ID NO: 135500 - protein, 10 aa, synthetic construct
EIPRGDRSQT

SEQ ID NO: 135501 - protein, 10 aa, synthetic construct
EILRGDRSQT

SEQ ID NO: 135502 - protein, 10 aa, synthetic construct
EIIRGDRSQT

SEQ ID NO: 135503 - protein, 10 aa, synthetic construct
EIMRGDRSQT

SEQ ID NO: 135504 - protein, 10 aa, synthetic construct
EIWRGDRSQT

SEQ ID NO: 135505 - protein, 10 aa, synthetic construct
EIFRGDRSQT

SEQ ID NO: 135506 - protein, 10 aa, synthetic construct
EIKRGDRSQT

SEQ ID NO: 135507 - protein, 10 aa, synthetic construct
EIRRGDRSQT

SEQ ID NO: 135508 - protein, 10 aa, synthetic construct
EIHRGDRSQT

SEQ ID NO: 135509 - protein, 10 aa, synthetic construct
EISRGDRSQT

SEQ ID NO: 135510 - protein, 10 aa, synthetic construct
EITRGDRSQT

SEQ ID NO: 135511 - protein, 10 aa, synthetic construct
EIYRGDRSQT

SEQ ID NO: 135512 - protein, 10 aa, synthetic construct
EINRGDRSQT

SEQ ID NO: 135513 - protein, 10 aa, synthetic construct
EIQRGDRSQT

SEQ ID NO: 135514 - protein, 10 aa, synthetic construct
EIDRGDRSQT

SEQ ID NO: 135515 - protein, 10 aa, synthetic construct
EIERGDRSQT

SEQ ID NO: 135516 - protein, 10 aa, synthetic construct
EMGRGDRSQT

SEQ ID NO: 135517 - protein, 10 aa, synthetic construct
EMARGDRSQT

SEQ ID NO: 135518 - protein, 10 aa, synthetic construct
EMVRGDRSQT

SEQ ID NO: 135519 - protein, 10 aa, synthetic construct
EMPRGDRSQT

SEQ ID NO: 135520 - protein, 10 aa, synthetic construct
EMLRGDRSQT

SEQ ID NO: 135521 - protein, 10 aa, synthetic construct
EMIRGDRSQT

SEQ ID NO: 135522 - protein, 10 aa, synthetic construct
EMMRGDRSQT

SEQ ID NO: 135523 - protein, 10 aa, synthetic construct
EMWRGDRSQT

SEQ ID NO: 135524 - protein, 10 aa, synthetic construct
EMFRGDRSQT

SEQ ID NO: 135525 - protein, 10 aa, synthetic construct
EMKRGDRSQT

SEQ ID NO: 135526 - protein, 10 aa, synthetic construct
EMRRGDRSQT

SEQ ID NO: 135527 - protein, 10 aa, synthetic construct
EMHRGDRSQT

SEQ ID NO: 135528 - protein, 10 aa, synthetic construct
EMSRGDRSQT

SEQ ID NO: 135529 - protein, 10 aa, synthetic construct
EMTRGDRSQT

SEQ ID NO: 135530 - protein, 10 aa, synthetic construct
EMYRGDRSQT

SEQ ID NO: 135531 - protein, 10 aa, synthetic construct
EMNRGDRSQT

SEQ ID NO: 135532 - protein, 10 aa, synthetic construct
EMQRGDRSQT

SEQ ID NO: 135533 - protein, 10 aa, synthetic construct
EMDRGDRSQT

SEQ ID NO: 135534 - protein, 10 aa, synthetic construct
EMERGDRSQT

SEQ ID NO: 135535 - protein, 10 aa, synthetic construct
EWGRGDRSQT

SEQ ID NO: 135536 - protein, 10 aa, synthetic construct
EWARGDRSQT

SEQ ID NO: 135537 - protein, 10 aa, synthetic construct
EWVRGDRSQT

SEQ ID NO: 135538 - protein, 10 aa, synthetic construct
EWPRGDRSQT

SEQ ID NO: 135539 - protein, 10 aa, synthetic construct
EWLRGDRSQT

SEQ ID NO: 135540 - protein, 10 aa, synthetic construct
EWIRGDRSQT

SEQ ID NO: 135541 - protein, 10 aa, synthetic construct
EWMRGDRSQT

SEQ ID NO: 135542 - protein, 10 aa, synthetic construct
EWWRGDRSQT

SEQ ID NO: 135543 - protein, 10 aa, synthetic construct
EWFRGDRSQT

SEQ ID NO: 135544 - protein, 10 aa, synthetic construct
EWKRGDRSQT

SEQ ID NO: 135545 - protein, 10 aa, synthetic construct
EWRRGDRSQT

SEQ ID NO: 135546 - protein, 10 aa, synthetic construct
EWHRGDRSQT

SEQ ID NO: 135547 - protein, 10 aa, synthetic construct
EWSRGDRSQT

SEQ ID NO: 135548 - protein, 10 aa, synthetic construct
EWTRGDRSQT

SEQ ID NO: 135549 - protein, 10 aa, synthetic construct
EWYRGDRSQT

SEQ ID NO: 135550 - protein, 10 aa, synthetic construct
EWNRGDRSQT

SEQ ID NO: 135551 - protein, 10 aa, synthetic construct
EWQRGDRSQT

SEQ ID NO: 135552 - protein, 10 aa, synthetic construct
EWDRGDRSQT

SEQ ID NO: 135553 - protein, 10 aa, synthetic construct
EWERGDRSQT

SEQ ID NO: 135554 - protein, 10 aa, synthetic construct
EFGRGDRSQT

SEQ ID NO: 135555 - protein, 10 aa, synthetic construct
EFARGDRSQT

SEQ ID NO: 135556 - protein, 10 aa, synthetic construct
EFVRGDRSQT

SEQ ID NO: 135557 - protein, 10 aa, synthetic construct
EFPRGDRSQT

SEQ ID NO: 135558 - protein, 10 aa, synthetic construct
EFLRGDRSQT

SEQ ID NO: 135559 - protein, 10 aa, synthetic construct
EFIRGDRSQT

SEQ ID NO: 135560 - protein, 10 aa, synthetic construct
EFMRGDRSQT

SEQ ID NO: 135561 - protein, 10 aa, synthetic construct
EFWRGDRSQT

SEQ ID NO: 135562 - protein, 10 aa, synthetic construct
EFFRGDRSQT

SEQ ID NO: 135563 - protein, 10 aa, synthetic construct
EFKRGDRSQT

SEQ ID NO: 135564 - protein, 10 aa, synthetic construct
EFRRGDRSQT

SEQ ID NO: 135565 - protein, 10 aa, synthetic construct
EFHRGDRSQT

SEQ ID NO: 135566 - protein, 10 aa, synthetic construct
EFSRGDRSQT

SEQ ID NO: 135567 - protein, 10 aa, synthetic construct
EFTRGDRSQT

SEQ ID NO: 135568 - protein, 10 aa, synthetic construct
EFYRGDRSQT

SEQ ID NO: 135569 - protein, 10 aa, synthetic construct
EFNRGDRSQT

SEQ ID NO: 135570 - protein, 10 aa, synthetic construct
EFQRGDRSQT

SEQ ID NO: 135571 - protein, 10 aa, synthetic construct
EFDRGDRSQT

SEQ ID NO: 135572 - protein, 10 aa, synthetic construct
EFERGDRSQT

SEQ ID NO: 135573 - protein, 10 aa, synthetic construct
EKGRGDRSQT

SEQ ID NO: 135574 - protein, 10 aa, synthetic construct
EKARGDRSQT

SEQ ID NO: 135575 - protein, 10 aa, synthetic construct
EKVRGDRSQT

SEQ ID NO: 135576 - protein, 10 aa, synthetic construct
EKPRGDRSQT

SEQ ID NO: 135577 - protein, 10 aa, synthetic construct
EKLRGDRSQT

SEQ ID NO: 135578 - protein, 10 aa, synthetic construct
EKIRGDRSQT

SEQ ID NO: 135579 - protein, 10 aa, synthetic construct
EKMRGDRSQT

SEQ ID NO: 135580 - protein, 10 aa, synthetic construct
EKWRGDRSQT

SEQ ID NO: 135581 - protein, 10 aa, synthetic construct
EKFRGDRSQT

SEQ ID NO: 135582 - protein, 10 aa, synthetic construct
EKKRGDRSQT

SEQ ID NO: 135583 - protein, 10 aa, synthetic construct
EKRRGDRSQT

SEQ ID NO: 135584 - protein, 10 aa, synthetic construct
EKHRGDRSQT

SEQ ID NO: 135585 - protein, 10 aa, synthetic construct
EKSRGDRSQT

SEQ ID NO: 135586 - protein, 10 aa, synthetic construct
EKTRGDRSQT

SEQ ID NO: 135587 - protein, 10 aa, synthetic construct
EKYRGDRSQT

SEQ ID NO: 135588 - protein, 10 aa, synthetic construct
EKNRGDRSQT

SEQ ID NO: 135589 - protein, 10 aa, synthetic construct
EKQRGDRSQT

SEQ ID NO: 135590 - protein, 10 aa, synthetic construct
EKDRGDRSQT

SEQ ID NO: 135591 - protein, 10 aa, synthetic construct
EKERGDRSQT

SEQ ID NO: 135592 - protein, 10 aa, synthetic construct
ERGRGDRSQT

SEQ ID NO: 135593 - protein, 10 aa, synthetic construct
ERARGDRSQT

SEQ ID NO: 135594 - protein, 10 aa, synthetic construct
ERVRGDRSQT

SEQ ID NO: 135595 - protein, 10 aa, synthetic construct
ERPRGDRSQT

SEQ ID NO: 135596 - protein, 10 aa, synthetic construct
ERLRGDRSQT

SEQ ID NO: 135597 - protein, 10 aa, synthetic construct
ERIRGDRSQT

SEQ ID NO: 135598 - protein, 10 aa, synthetic construct
ERMRGDRSQT

SEQ ID NO: 135599 - protein, 10 aa, synthetic construct
ERWRGDRSQT

SEQ ID NO: 135600 - protein, 10 aa, synthetic construct
ERFRGDRSQT

SEQ ID NO: 135601 - protein, 10 aa, synthetic construct
ERKRGDRSQT

SEQ ID NO: 135602 - protein, 10 aa, synthetic construct
ERRRGDRSQT

SEQ ID NO: 135603 - protein, 10 aa, synthetic construct
ERHRGDRSQT

SEQ ID NO: 135604 - protein, 10 aa, synthetic construct
ERSRGDRSQT

SEQ ID NO: 135605 - protein, 10 aa, synthetic construct
ERTRGDRSQT

SEQ ID NO: 135606 - protein, 10 aa, synthetic construct
ERYRGDRSQT

SEQ ID NO: 135607 - protein, 10 aa, synthetic construct
ERNRGDRSQT

SEQ ID NO: 135608 - protein, 10 aa, synthetic construct
ERQRGDRSQT

SEQ ID NO: 135609 - protein, 10 aa, synthetic construct
ERDRGDRSQT

SEQ ID NO: 135610 - protein, 10 aa, synthetic construct
ERERGDRSQT

SEQ ID NO: 135611 - protein, 10 aa, synthetic construct
EHGRGDRSQT

SEQ ID NO: 135612 - protein, 10 aa, synthetic construct
EHARGDRSQT

SEQ ID NO: 135613 - protein, 10 aa, synthetic construct
EHVRGDRSQT

SEQ ID NO: 135614 - protein, 10 aa, synthetic construct
EHPRGDRSQT

SEQ ID NO: 135615 - protein, 10 aa, synthetic construct
EHLRGDRSQT

SEQ ID NO: 135616 - protein, 10 aa, synthetic construct
EHIRGDRSQT

SEQ ID NO: 135617 - protein, 10 aa, synthetic construct
EHMRGDRSQT

SEQ ID NO: 135618 - protein, 10 aa, synthetic construct
EHWRGDRSQT

SEQ ID NO: 135619 - protein, 10 aa, synthetic construct
EHFRGDRSQT

SEQ ID NO: 135620 - protein, 10 aa, synthetic construct
EHKRGDRSQT

SEQ ID NO: 135621 - protein, 10 aa, synthetic construct
EHRRGDRSQT

SEQ ID NO: 135622 - protein, 10 aa, synthetic construct
EHHRGDRSQT

SEQ ID NO: 135623 - protein, 10 aa, synthetic construct
EHSRGDRSQT

SEQ ID NO: 135624 - protein, 10 aa, synthetic construct
EHTRGDRSQT

SEQ ID NO: 135625 - protein, 10 aa, synthetic construct
EHYRGDRSQT

SEQ ID NO: 135626 - protein, 10 aa, synthetic construct
EHNRGDRSQT

SEQ ID NO: 135627 - protein, 10 aa, synthetic construct
EHQRGDRSQT

SEQ ID NO: 135628 - protein, 10 aa, synthetic construct
EHDRGDRSQT

SEQ ID NO: 135629 - protein, 10 aa, synthetic construct
EHERGDRSQT

SEQ ID NO: 135630 - protein, 10 aa, synthetic construct
ESGRGDRSQT

SEQ ID NO: 135631 - protein, 10 aa, synthetic construct
ESARGDRSQT

SEQ ID NO: 135632 - protein, 10 aa, synthetic construct
ESVRGDRSQT

SEQ ID NO: 135633 - protein, 10 aa, synthetic construct
ESPRGDRSQT

SEQ ID NO: 135634 - protein, 10 aa, synthetic construct
ESLRGDRSQT

SEQ ID NO: 135635 - protein, 10 aa, synthetic construct
ESIRGDRSQT

SEQ ID NO: 135636 - protein, 10 aa, synthetic construct
ESMRGDRSQT

SEQ ID NO: 135637 - protein, 10 aa, synthetic construct
ESWRGDRSQT

SEQ ID NO: 135638 - protein, 10 aa, synthetic construct
ESFRGDRSQT

SEQ ID NO: 135639 - protein, 10 aa, synthetic construct
ESKRGDRSQT

SEQ ID NO: 135640 - protein, 10 aa, synthetic construct
ESRRGDRSQT

SEQ ID NO: 135641 - protein, 10 aa, synthetic construct
ESHRGDRSQT

SEQ ID NO: 135642 - protein, 10 aa, synthetic construct
ESSRGDRSQT

SEQ ID NO: 135643 - protein, 10 aa, synthetic construct
ESTRGDRSQT

SEQ ID NO: 135644 - protein, 10 aa, synthetic construct
ESYRGDRSQT

SEQ ID NO: 135645 - protein, 10 aa, synthetic construct
ESNRGDRSQT

SEQ ID NO: 135646 - protein, 10 aa, synthetic construct
ESQRGDRSQT

SEQ ID NO: 135647 - protein, 10 aa, synthetic construct
ESDRGDRSQT

SEQ ID NO: 135648 - protein, 10 aa, synthetic construct
ESERGDRSQT

SEQ ID NO: 135649 - protein, 10 aa, synthetic construct
ETGRGDRSQT

SEQ ID NO: 135650 - protein, 10 aa, synthetic construct
ETARGDRSQT

SEQ ID NO: 135651 - protein, 10 aa, synthetic construct
ETVRGDRSQT

SEQ ID NO: 135652 - protein, 10 aa, synthetic construct
ETPRGDRSQT

SEQ ID NO: 135653 - protein, 10 aa, synthetic construct
ETLRGDRSQT

SEQ ID NO: 135654 - protein, 10 aa, synthetic construct
ETIRGDRSQT

SEQ ID NO: 135655 - protein, 10 aa, synthetic construct
ETMRGDRSQT

SEQ ID NO: 135656 - protein, 10 aa, synthetic construct
ETWRGDRSQT

SEQ ID NO: 135657 - protein, 10 aa, synthetic construct
ETFRGDRSQT

SEQ ID NO: 135658 - protein, 10 aa, synthetic construct
ETKRGDRSQT

SEQ ID NO: 135659 - protein, 10 aa, synthetic construct
ETRRGDRSQT

SEQ ID NO: 135660 - protein, 10 aa, synthetic construct
ETHRGDRSQT

SEQ ID NO: 135661 - protein, 10 aa, synthetic construct
ETSRGDRSQT

SEQ ID NO: 135662 - protein, 10 aa, synthetic construct
ETTRGDRSQT

SEQ ID NO: 135663 - protein, 10 aa, synthetic construct
ETYRGDRSQT

SEQ ID NO: 135664 - protein, 10 aa, synthetic construct
ETNRGDRSQT

SEQ ID NO: 135665 - protein, 10 aa, synthetic construct
ETQRGDRSQT

SEQ ID NO: 135666 - protein, 10 aa, synthetic construct
ETDRGDRSQT

SEQ ID NO: 135667 - protein, 10 aa, synthetic construct
ETERGDRSQT

SEQ ID NO: 135668 - protein, 10 aa, synthetic construct
EYGRGDRSQT

SEQ ID NO: 135669 - protein, 10 aa, synthetic construct
EYARGDRSQT

SEQ ID NO: 135670 - protein, 10 aa, synthetic construct
EYVRGDRSQT

SEQ ID NO: 135671 - protein, 10 aa, synthetic construct
EYPRGDRSQT

SEQ ID NO: 135672 - protein, 10 aa, synthetic construct
EYLRGDRSQT

SEQ ID NO: 135673 - protein, 10 aa, synthetic construct
EYIRGDRSQT

SEQ ID NO: 135674 - protein, 10 aa, synthetic construct
EYMRGDRSQT

SEQ ID NO: 135675 - protein, 10 aa, synthetic construct
EYWRGDRSQT

SEQ ID NO: 135676 - protein, 10 aa, synthetic construct
EYFRGDRSQT

SEQ ID NO: 135677 - protein, 10 aa, synthetic construct
EYKRGDRSQT

SEQ ID NO: 135678 - protein, 10 aa, synthetic construct
EYRRGDRSQT

SEQ ID NO: 135679 - protein, 10 aa, synthetic construct
EYHRGDRSQT

SEQ ID NO: 135680 - protein, 10 aa, synthetic construct
EYSRGDRSQT

SEQ ID NO: 135681 - protein, 10 aa, synthetic construct
EYTRGDRSQT

SEQ ID NO: 135682 - protein, 10 aa, synthetic construct
EYYRGDRSQT

SEQ ID NO: 135683 - protein, 10 aa, synthetic construct
EYNRGDRSQT

SEQ ID NO: 135684 - protein, 10 aa, synthetic construct
EYQRGDRSQT

SEQ ID NO: 135685 - protein, 10 aa, synthetic construct
EYDRGDRSQT

SEQ ID NO: 135686 - protein, 10 aa, synthetic construct
EYERGDRSQT

SEQ ID NO: 135687 - protein, 10 aa, synthetic construct
ENGRGDRSQT

SEQ ID NO: 135688 - protein, 10 aa, synthetic construct
ENARGDRSQT

SEQ ID NO: 135689 - protein, 10 aa, synthetic construct
ENVRGDRSQT

SEQ ID NO: 135690 - protein, 10 aa, synthetic construct
ENPRGDRSQT

SEQ ID NO: 135691 - protein, 10 aa, synthetic construct
ENLRGDRSQT

SEQ ID NO: 135692 - protein, 10 aa, synthetic construct
ENIRGDRSQT

SEQ ID NO: 135693 - protein, 10 aa, synthetic construct
ENMRGDRSQT

SEQ ID NO: 135694 - protein, 10 aa, synthetic construct
ENWRGDRSQT

SEQ ID NO: 135695 - protein, 10 aa, synthetic construct
ENFRGDRSQT

SEQ ID NO: 135696 - protein, 10 aa, synthetic construct
ENKRGDRSQT

SEQ ID NO: 135697 - protein, 10 aa, synthetic construct
ENRRGDRSQT

SEQ ID NO: 135698 - protein, 10 aa, synthetic construct
ENHRGDRSQT

SEQ ID NO: 135699 - protein, 10 aa, synthetic construct
ENSRGDRSQT

SEQ ID NO: 135700 - protein, 10 aa, synthetic construct
ENTRGDRSQT

SEQ ID NO: 135701 - protein, 10 aa, synthetic construct
ENYRGDRSQT

SEQ ID NO: 135702 - protein, 10 aa, synthetic construct
ENNRGDRSQT

SEQ ID NO: 135703 - protein, 10 aa, synthetic construct
ENQRGDRSQT

SEQ ID NO: 135704 - protein, 10 aa, synthetic construct
ENDRGDRSQT

SEQ ID NO: 135705 - protein, 10 aa, synthetic construct
ENERGDRSQT

SEQ ID NO: 135706 - protein, 10 aa, synthetic construct
EQGRGDRSQT

SEQ ID NO: 135707 - protein, 10 aa, synthetic construct
EQARGDRSQT

SEQ ID NO: 135708 - protein, 10 aa, synthetic construct
EQVRGDRSQT

SEQ ID NO: 135709 - protein, 10 aa, synthetic construct
EQPRGDRSQT

SEQ ID NO: 135710 - protein, 10 aa, synthetic construct
EQLRGDRSQT

SEQ ID NO: 135711 - protein, 10 aa, synthetic construct
EQIRGDRSQT

SEQ ID NO: 135712 - protein, 10 aa, synthetic construct
EQMRGDRSQT

SEQ ID NO: 135713 - protein, 10 aa, synthetic construct
EQWRGDRSQT

SEQ ID NO: 135714 - protein, 10 aa, synthetic construct
EQFRGDRSQT

SEQ ID NO: 135715 - protein, 10 aa, synthetic construct
EQKRGDRSQT

SEQ ID NO: 135716 - protein, 10 aa, synthetic construct
EQRRGDRSQT

SEQ ID NO: 135717 - protein, 10 aa, synthetic construct
EQHRGDRSQT

SEQ ID NO: 135718 - protein, 10 aa, synthetic construct
EQSRGDRSQT

SEQ ID NO: 135719 - protein, 10 aa, synthetic construct
EQTRGDRSQT

SEQ ID NO: 135720 - protein, 10 aa, synthetic construct
EQYRGDRSQT

SEQ ID NO: 135721 - protein, 10 aa, synthetic construct
EQNRGDRSQT

SEQ ID NO: 135722 - protein, 10 aa, synthetic construct
EQQRGDRSQT

SEQ ID NO: 135723 - protein, 10 aa, synthetic construct
EQDRGDRSQT

SEQ ID NO: 135724 - protein, 10 aa, synthetic construct
EQERGDRSQT

SEQ ID NO: 135725 - protein, 10 aa, synthetic construct
EDGRGDRSQT

SEQ ID NO: 135726 - protein, 10 aa, synthetic construct
EDARGDRSQT

SEQ ID NO: 135727 - protein, 10 aa, synthetic construct
EDVRGDRSQT

SEQ ID NO: 135728 - protein, 10 aa, synthetic construct
EDPRGDRSQT

SEQ ID NO: 135729 - protein, 10 aa, synthetic construct
EDLRGDRSQT

SEQ ID NO: 135730 - protein, 10 aa, synthetic construct
EDIRGDRSQT

SEQ ID NO: 135731 - protein, 10 aa, synthetic construct
EDMRGDRSQT

SEQ ID NO: 135732 - protein, 10 aa, synthetic construct
EDWRGDRSQT

SEQ ID NO: 135733 - protein, 10 aa, synthetic construct
EDFRGDRSQT

SEQ ID NO: 135734 - protein, 10 aa, synthetic construct
EDKRGDRSQT

SEQ ID NO: 135735 - protein, 10 aa, synthetic construct
EDRRGDRSQT

SEQ ID NO: 135736 - protein, 10 aa, synthetic construct
EDHRGDRSQT

SEQ ID NO: 135737 - protein, 10 aa, synthetic construct
EDSRGDRSQT

SEQ ID NO: 135738 - protein, 10 aa, synthetic construct
EDTRGDRSQT

SEQ ID NO: 135739 - protein, 10 aa, synthetic construct
EDYRGDRSQT

SEQ ID NO: 135740 - protein, 10 aa, synthetic construct
EDNRGDRSQT

SEQ ID NO: 135741 - protein, 10 aa, synthetic construct
EDQRGDRSQT

SEQ ID NO: 135742 - protein, 10 aa, synthetic construct
EDDRGDRSQT

SEQ ID NO: 135743 - protein, 10 aa, synthetic construct
EDERGDRSQT

SEQ ID NO: 135744 - protein, 10 aa, synthetic construct
EEGRGDRSQT

SEQ ID NO: 135745 - protein, 10 aa, synthetic construct
EEARGDRSQT

SEQ ID NO: 135746 - protein, 10 aa, synthetic construct
EEVRGDRSQT

SEQ ID NO: 135747 - protein, 10 aa, synthetic construct
EEPRGDRSQT

SEQ ID NO: 135748 - protein, 10 aa, synthetic construct
EELRGDRSQT

SEQ ID NO: 135749 - protein, 10 aa, synthetic construct
EEIRGDRSQT

SEQ ID NO: 135750 - protein, 10 aa, synthetic construct
EEMRGDRSQT

SEQ ID NO: 135751 - protein, 10 aa, synthetic construct
EEWRGDRSQT

SEQ ID NO: 135752 - protein, 10 aa, synthetic construct
EEFRGDRSQT

SEQ ID NO: 135753 - protein, 10 aa, synthetic construct
EEKRGDRSQT

SEQ ID NO: 135754 - protein, 10 aa, synthetic construct
EERRGDRSQT

SEQ ID NO: 135755 - protein, 10 aa, synthetic construct
EEHRGDRSQT

SEQ ID NO: 135756 - protein, 10 aa, synthetic construct
EESRGDRSQT

SEQ ID NO: 135757 - protein, 10 aa, synthetic construct
EETRGDRSQT

SEQ ID NO: 135758 - protein, 10 aa, synthetic construct
EEYRGDRSQT

SEQ ID NO: 135759 - protein, 10 aa, synthetic construct
EENRGDRSQT

SEQ ID NO: 135760 - protein, 10 aa, synthetic construct
EEQRGDRSQT

SEQ ID NO: 135761 - protein, 10 aa, synthetic construct
EEDRGDRSQT

SEQ ID NO: 135762 - protein, 10 aa, synthetic construct
EEERGDRSQT

SEQ ID NO: 135763 - protein, 10 aa, synthetic construct
NGGRGDRSQT

SEQ ID NO: 135764 - protein, 10 aa, synthetic construct
NGARGDRSQT

SEQ ID NO: 135765 - protein, 10 aa, synthetic construct
NGVRGDRSQT

SEQ ID NO: 135766 - protein, 10 aa, synthetic construct
NGPRGDRSQT

SEQ ID NO: 135767 - protein, 10 aa, synthetic construct
NGLRGDRSQT

SEQ ID NO: 135768 - protein, 10 aa, synthetic construct
NGIRGDRSQT

SEQ ID NO: 135769 - protein, 10 aa, synthetic construct
NGMRGDRSQT

SEQ ID NO: 135770 - protein, 10 aa, synthetic construct
NGWRGDRSQT

SEQ ID NO: 135771 - protein, 10 aa, synthetic construct
NGFRGDRSQT

SEQ ID NO: 135772 - protein, 10 aa, synthetic construct
NGKRGDRSQT

SEQ ID NO: 135773 - protein, 10 aa, synthetic construct
NGRRGDRSQT

SEQ ID NO: 135774 - protein, 10 aa, synthetic construct
NGHRGDRSQT

SEQ ID NO: 135775 - protein, 10 aa, synthetic construct
NGSRGDRSQT

SEQ ID NO: 135776 - protein, 10 aa, synthetic construct
NGTRGDRSQT

SEQ ID NO: 135777 - protein, 10 aa, synthetic construct
NGYRGDRSQT

SEQ ID NO: 135778 - protein, 10 aa, synthetic construct
NGNRGDRSQT

SEQ ID NO: 135779 - protein, 10 aa, synthetic construct
NGQRGDRSQT

SEQ ID NO: 135780 - protein, 10 aa, synthetic construct
NGDRGDRSQT

SEQ ID NO: 135781 - protein, 10 aa, synthetic construct
NGERGDRSQT

SEQ ID NO: 135782 - protein, 10 aa, synthetic construct
NAGRGDRSQT

SEQ ID NO: 135783 - protein, 10 aa, synthetic construct
NAARGDRSQT

SEQ ID NO: 135784 - protein, 10 aa, synthetic construct
NAVRGDRSQT

SEQ ID NO: 135785 - protein, 10 aa, synthetic construct
NAPRGDRSQT

SEQ ID NO: 135786 - protein, 10 aa, synthetic construct
NALRGDRSQT

SEQ ID NO: 135787 - protein, 10 aa, synthetic construct
NAIRGDRSQT

SEQ ID NO: 135788 - protein, 10 aa, synthetic construct
NAMRGDRSQT

SEQ ID NO: 135789 - protein, 10 aa, synthetic construct
NAWRGDRSQT

SEQ ID NO: 135790 - protein, 10 aa, synthetic construct
NAFRGDRSQT

SEQ ID NO: 135791 - protein, 10 aa, synthetic construct
NAKRGDRSQT

SEQ ID NO: 135792 - protein, 10 aa, synthetic construct
NARRGDRSQT

SEQ ID NO: 135793 - protein, 10 aa, synthetic construct
NAHRGDRSQT

SEQ ID NO: 135794 - protein, 10 aa, synthetic construct
NASRGDRSQT

SEQ ID NO: 135795 - protein, 10 aa, synthetic construct
NATRGDRSQT

SEQ ID NO: 135796 - protein, 10 aa, synthetic construct
NAYRGDRSQT

SEQ ID NO: 135797 - protein, 10 aa, synthetic construct
NANRGDRSQT

SEQ ID NO: 135798 - protein, 10 aa, synthetic construct
NAQRGDRSQT

SEQ ID NO: 135799 - protein, 10 aa, synthetic construct
NADRGDRSQT

SEQ ID NO: 135800 - protein, 10 aa, synthetic construct
NAERGDRSQT

SEQ ID NO: 135801 - protein, 10 aa, synthetic construct
NVGRGDRSQT

SEQ ID NO: 135802 - protein, 10 aa, synthetic construct
NVARGDRSQT

SEQ ID NO: 135803 - protein, 10 aa, synthetic construct
NVVRGDRSQT

SEQ ID NO: 135804 - protein, 10 aa, synthetic construct
NVPRGDRSQT

SEQ ID NO: 135805 - protein, 10 aa, synthetic construct
NVLRGDRSQT

SEQ ID NO: 135806 - protein, 10 aa, synthetic construct
NVIRGDRSQT

SEQ ID NO: 135807 - protein, 10 aa, synthetic construct
NVMRGDRSQT

SEQ ID NO: 135808 - protein, 10 aa, synthetic construct
NVWRGDRSQT

SEQ ID NO: 135809 - protein, 10 aa, synthetic construct
NVFRGDRSQT

SEQ ID NO: 135810 - protein, 10 aa, synthetic construct
NVKRGDRSQT

SEQ ID NO: 135811 - protein, 10 aa, synthetic construct
NVRRGDRSQT

SEQ ID NO: 135812 - protein, 10 aa, synthetic construct
NVHRGDRSQT

SEQ ID NO: 135813 - protein, 10 aa, synthetic construct
NVSRGDRSQT

SEQ ID NO: 135814 - protein, 10 aa, synthetic construct
NVTRGDRSQT

SEQ ID NO: 135815 - protein, 10 aa, synthetic construct
NVYRGDRSQT

SEQ ID NO: 135816 - protein, 10 aa, synthetic construct
NVNRGDRSQT

SEQ ID NO: 135817 - protein, 10 aa, synthetic construct
NVQRGDRSQT

SEQ ID NO: 135818 - protein, 10 aa, synthetic construct
NVDRGDRSQT

SEQ ID NO: 135819 - protein, 10 aa, synthetic construct
NVERGDRSQT

SEQ ID NO: 135820 - protein, 10 aa, synthetic construct
NPGRGDRSQT

SEQ ID NO: 135821 - protein, 10 aa, synthetic construct
NPARGDRSQT

SEQ ID NO: 135822 - protein, 10 aa, synthetic construct
NPVRGDRSQT

SEQ ID NO: 135823 - protein, 10 aa, synthetic construct
NPPRGDRSQT

SEQ ID NO: 135824 - protein, 10 aa, synthetic construct
NPLRGDRSQT

SEQ ID NO: 135825 - protein, 10 aa, synthetic construct
NPIRGDRSQT

SEQ ID NO: 135826 - protein, 10 aa, synthetic construct
NPMRGDRSQT

SEQ ID NO: 135827 - protein, 10 aa, synthetic construct
NPWRGDRSQT

SEQ ID NO: 135828 - protein, 10 aa, synthetic construct
NPFRGDRSQT

SEQ ID NO: 135829 - protein, 10 aa, synthetic construct
NPKRGDRSQT

SEQ ID NO: 135830 - protein, 10 aa, synthetic construct
NPRRGDRSQT

SEQ ID NO: 135831 - protein, 10 aa, synthetic construct
NPHRGDRSQT

SEQ ID NO: 135832 - protein, 10 aa, synthetic construct
NPSRGDRSQT

SEQ ID NO: 135833 - protein, 10 aa, synthetic construct
NPTRGDRSQT

SEQ ID NO: 135834 - protein, 10 aa, synthetic construct
NPYRGDRSQT

SEQ ID NO: 135835 - protein, 10 aa, synthetic construct
NPNRGDRSQT

SEQ ID NO: 135836 - protein, 10 aa, synthetic construct
NPQRGDRSQT

SEQ ID NO: 135837 - protein, 10 aa, synthetic construct
NPDRGDRSQT

SEQ ID NO: 135838 - protein, 10 aa, synthetic construct
NPERGDRSQT

SEQ ID NO: 135839 - protein, 10 aa, synthetic construct
NLGRGDRSQT

SEQ ID NO: 135840 - protein, 10 aa, synthetic construct
NLARGDRSQT

SEQ ID NO: 135841 - protein, 10 aa, synthetic construct
NLVRGDRSQT

SEQ ID NO: 135842 - protein, 10 aa, synthetic construct
NLPRGDRSQT

SEQ ID NO: 135843 - protein, 10 aa, synthetic construct
NLLRGDRSQT

SEQ ID NO: 135844 - protein, 10 aa, synthetic construct
NLIRGDRSQT

SEQ ID NO: 135845 - protein, 10 aa, synthetic construct
NLMRGDRSQT

SEQ ID NO: 135846 - protein, 10 aa, synthetic construct
NLWRGDRSQT

SEQ ID NO: 135847 - protein, 10 aa, synthetic construct
NLFRGDRSQT

SEQ ID NO: 135848 - protein, 10 aa, synthetic construct
NLKRGDRSQT

SEQ ID NO: 135849 - protein, 10 aa, synthetic construct
NLRRGDRSQT

SEQ ID NO: 135850 - protein, 10 aa, synthetic construct
NLHRGDRSQT

SEQ ID NO: 135851 - protein, 10 aa, synthetic construct
NLSRGDRSQT

SEQ ID NO: 135852 - protein, 10 aa, synthetic construct
NLTRGDRSQT

SEQ ID NO: 135853 - protein, 10 aa, synthetic construct
NLYRGDRSQT

SEQ ID NO: 135854 - protein, 10 aa, synthetic construct
NLNRGDRSQT

SEQ ID NO: 135855 - protein, 10 aa, synthetic construct
NLQRGDRSQT

SEQ ID NO: 135856 - protein, 10 aa, synthetic construct
NLDRGDRSQT

SEQ ID NO: 135857 - protein, 10 aa, synthetic construct
NLERGDRSQT

SEQ ID NO: 135858 - protein, 10 aa, synthetic construct
NIGRGDRSQT

SEQ ID NO: 135859 - protein, 10 aa, synthetic construct
NIARGDRSQT

SEQ ID NO: 135860 - protein, 10 aa, synthetic construct
NIVRGDRSQT

SEQ ID NO: 135861 - protein, 10 aa, synthetic construct
NIPRGDRSQT

SEQ ID NO: 135862 - protein, 10 aa, synthetic construct
NILRGDRSQT

SEQ ID NO: 135863 - protein, 10 aa, synthetic construct
NIIRGDRSQT

SEQ ID NO: 135864 - protein, 10 aa, synthetic construct
NIMRGDRSQT

SEQ ID NO: 135865 - protein, 10 aa, synthetic construct
NIWRGDRSQT

SEQ ID NO: 135866 - protein, 10 aa, synthetic construct
NIFRGDRSQT

SEQ ID NO: 135867 - protein, 10 aa, synthetic construct
NIKRGDRSQT

SEQ ID NO: 135868 - protein, 10 aa, synthetic construct
NIRRGDRSQT

SEQ ID NO: 135869 - protein, 10 aa, synthetic construct
NIHRGDRSQT

SEQ ID NO: 135870 - protein, 10 aa, synthetic construct
NISRGDRSQT

SEQ ID NO: 135871 - protein, 10 aa, synthetic construct
NITRGDRSQT

SEQ ID NO: 135872 - protein, 10 aa, synthetic construct
NIYRGDRSQT

SEQ ID NO: 135873 - protein, 10 aa, synthetic construct
NINRGDRSQT

SEQ ID NO: 135874 - protein, 10 aa, synthetic construct
NIQRGDRSQT

SEQ ID NO: 135875 - protein, 10 aa, synthetic construct
NIDRGDRSQT

SEQ ID NO: 135876 - protein, 10 aa, synthetic construct
NIERGDRSQT

SEQ ID NO: 135877 - protein, 10 aa, synthetic construct
NMGRGDRSQT

SEQ ID NO: 135878 - protein, 10 aa, synthetic construct
NMARGDRSQT

SEQ ID NO: 135879 - protein, 10 aa, synthetic construct
NMVRGDRSQT

SEQ ID NO: 135880 - protein, 10 aa, synthetic construct
NMPRGDRSQT

SEQ ID NO: 135881 - protein, 10 aa, synthetic construct
NMLRGDRSQT

SEQ ID NO: 135882 - protein, 10 aa, synthetic construct
NMIRGDRSQT

SEQ ID NO: 135883 - protein, 10 aa, synthetic construct
NMMRGDRSQT

SEQ ID NO: 135884 - protein, 10 aa, synthetic construct
NMWRGDRSQT

SEQ ID NO: 135885 - protein, 10 aa, synthetic construct
NMFRGDRSQT

SEQ ID NO: 135886 - protein, 10 aa, synthetic construct
NMKRGDRSQT

SEQ ID NO: 135887 - protein, 10 aa, synthetic construct
NMRRGDRSQT

SEQ ID NO: 135888 - protein, 10 aa, synthetic construct
NMHRGDRSQT

SEQ ID NO: 135889 - protein, 10 aa, synthetic construct
NMSRGDRSQT

SEQ ID NO: 135890 - protein, 10 aa, synthetic construct
NMTRGDRSQT

SEQ ID NO: 135891 - protein, 10 aa, synthetic construct
NMYRGDRSQT

SEQ ID NO: 135892 - protein, 10 aa, synthetic construct
NMNRGDRSQT

SEQ ID NO: 135893 - protein, 10 aa, synthetic construct
NMQRGDRSQT

SEQ ID NO: 135894 - protein, 10 aa, synthetic construct
NMDRGDRSQT

SEQ ID NO: 135895 - protein, 10 aa, synthetic construct
NMERGDRSQT

SEQ ID NO: 135896 - protein, 10 aa, synthetic construct
NWGRGDRSQT

SEQ ID NO: 135897 - protein, 10 aa, synthetic construct
NWARGDRSQT

SEQ ID NO: 135898 - protein, 10 aa, synthetic construct
NWVRGDRSQT

SEQ ID NO: 135899 - protein, 10 aa, synthetic construct
NWPRGDRSQT

SEQ ID NO: 135900 - protein, 10 aa, synthetic construct
NWLRGDRSQT

SEQ ID NO: 135901 - protein, 10 aa, synthetic construct
NWIRGDRSQT

SEQ ID NO: 135902 - protein, 10 aa, synthetic construct
NWMRGDRSQT

SEQ ID NO: 135903 - protein, 10 aa, synthetic construct
NWWRGDRSQT

SEQ ID NO: 135904 - protein, 10 aa, synthetic construct
NWFRGDRSQT

SEQ ID NO: 135905 - protein, 10 aa, synthetic construct
NWKRGDRSQT

SEQ ID NO: 135906 - protein, 10 aa, synthetic construct
NWRRGDRSQT

SEQ ID NO: 135907 - protein, 10 aa, synthetic construct
NWHRGDRSQT

SEQ ID NO: 135908 - protein, 10 aa, synthetic construct
NWSRGDRSQT

SEQ ID NO: 135909 - protein, 10 aa, synthetic construct
NWTRGDRSQT

SEQ ID NO: 135910 - protein, 10 aa, synthetic construct
NWYRGDRSQT

SEQ ID NO: 135911 - protein, 10 aa, synthetic construct
NWNRGDRSQT

SEQ ID NO: 135912 - protein, 10 aa, synthetic construct
NWQRGDRSQT

SEQ ID NO: 135913 - protein, 10 aa, synthetic construct
NWDRGDRSQT

SEQ ID NO: 135914 - protein, 10 aa, synthetic construct
NWERGDRSQT

SEQ ID NO: 135915 - protein, 10 aa, synthetic construct
NFGRGDRSQT

SEQ ID NO: 135916 - protein, 10 aa, synthetic construct
NFARGDRSQT

SEQ ID NO: 135917 - protein, 10 aa, synthetic construct
NFVRGDRSQT

SEQ ID NO: 135918 - protein, 10 aa, synthetic construct
NFPRGDRSQT

SEQ ID NO: 135919 - protein, 10 aa, synthetic construct
NFLRGDRSQT

SEQ ID NO: 135920 - protein, 10 aa, synthetic construct
NFIRGDRSQT

SEQ ID NO: 135921 - protein, 10 aa, synthetic construct
NFMRGDRSQT

SEQ ID NO: 135922 - protein, 10 aa, synthetic construct
NFWRGDRSQT

SEQ ID NO: 135923 - protein, 10 aa, synthetic construct
NFFRGDRSQT

SEQ ID NO: 135924 - protein, 10 aa, synthetic construct
NFKRGDRSQT

SEQ ID NO: 135925 - protein, 10 aa, synthetic construct
NFRRGDRSQT

SEQ ID NO: 135926 - protein, 10 aa, synthetic construct
NFHRGDRSQT

SEQ ID NO: 135927 - protein, 10 aa, synthetic construct
NFSRGDRSQT

SEQ ID NO: 135928 - protein, 10 aa, synthetic construct
NFTRGDRSQT

SEQ ID NO: 135929 - protein, 10 aa, synthetic construct
NFYRGDRSQT

SEQ ID NO: 135930 - protein, 10 aa, synthetic construct
NFNRGDRSQT

SEQ ID NO: 135931 - protein, 10 aa, synthetic construct
NFQRGDRSQT

SEQ ID NO: 135932 - protein, 10 aa, synthetic construct
NFDRGDRSQT

SEQ ID NO: 135933 - protein, 10 aa, synthetic construct
NFERGDRSQT

SEQ ID NO: 135934 - protein, 10 aa, synthetic construct
NKGRGDRSQT

SEQ ID NO: 135935 - protein, 10 aa, synthetic construct
NKARGDRSQT

SEQ ID NO: 135936 - protein, 10 aa, synthetic construct
NKVRGDRSQT

SEQ ID NO: 135937 - protein, 10 aa, synthetic construct
NKPRGDRSQT

SEQ ID NO: 135938 - protein, 10 aa, synthetic construct
NKLRGDRSQT

SEQ ID NO: 135939 - protein, 10 aa, synthetic construct
NKIRGDRSQT

SEQ ID NO: 135940 - protein, 10 aa, synthetic construct
NKMRGDRSQT

SEQ ID NO: 135941 - protein, 10 aa, synthetic construct
NKWRGDRSQT

SEQ ID NO: 135942 - protein, 10 aa, synthetic construct
NKFRGDRSQT

SEQ ID NO: 135943 - protein, 10 aa, synthetic construct
NKKRGDRSQT

SEQ ID NO: 135944 - protein, 10 aa, synthetic construct
NKRRGDRSQT

SEQ ID NO: 135945 - protein, 10 aa, synthetic construct
NKHRGDRSQT

SEQ ID NO: 135946 - protein, 10 aa, synthetic construct
NKSRGDRSQT

SEQ ID NO: 135947 - protein, 10 aa, synthetic construct
NKTRGDRSQT

SEQ ID NO: 135948 - protein, 10 aa, synthetic construct
NKYRGDRSQT

SEQ ID NO: 135949 - protein, 10 aa, synthetic construct
NKNRGDRSQT

SEQ ID NO: 135950 - protein, 10 aa, synthetic construct
NKQRGDRSQT

SEQ ID NO: 135951 - protein, 10 aa, synthetic construct
NKDRGDRSQT

SEQ ID NO: 135952 - protein, 10 aa, synthetic construct
NKERGDRSQT

SEQ ID NO: 135953 - protein, 10 aa, synthetic construct
NRGRGDRSQT

SEQ ID NO: 135954 - protein, 10 aa, synthetic construct
NRARGDRSQT

SEQ ID NO: 135955 - protein, 10 aa, synthetic construct
NRVRGDRSQT

SEQ ID NO: 135956 - protein, 10 aa, synthetic construct
NRPRGDRSQT

SEQ ID NO: 135957 - protein, 10 aa, synthetic construct
NRLRGDRSQT

SEQ ID NO: 135958 - protein, 10 aa, synthetic construct
NRIRGDRSQT

SEQ ID NO: 135959 - protein, 10 aa, synthetic construct
NRMRGDRSQT

SEQ ID NO: 135960 - protein, 10 aa, synthetic construct
NRWRGDRSQT

SEQ ID NO: 135961 - protein, 10 aa, synthetic construct
NRFRGDRSQT

SEQ ID NO: 135962 - protein, 10 aa, synthetic construct
NRKRGDRSQT

SEQ ID NO: 135963 - protein, 10 aa, synthetic construct
NRRRGDRSQT

SEQ ID NO: 135964 - protein, 10 aa, synthetic construct
NRHRGDRSQT

SEQ ID NO: 135965 - protein, 10 aa, synthetic construct
NRSRGDRSQT

SEQ ID NO: 135966 - protein, 10 aa, synthetic construct
NRTRGDRSQT

SEQ ID NO: 135967 - protein, 10 aa, synthetic construct
NRYRGDRSQT

SEQ ID NO: 135968 - protein, 10 aa, synthetic construct
NRNRGDRSQT

SEQ ID NO: 135969 - protein, 10 aa, synthetic construct
NRQRGDRSQT

SEQ ID NO: 135970 - protein, 10 aa, synthetic construct
NRDRGDRSQT

SEQ ID NO: 135971 - protein, 10 aa, synthetic construct
NRERGDRSQT

SEQ ID NO: 135972 - protein, 10 aa, synthetic construct
NHGRGDRSQT

SEQ ID NO: 135973 - protein, 10 aa, synthetic construct
NHARGDRSQT

SEQ ID NO: 135974 - protein, 10 aa, synthetic construct
NHVRGDRSQT

SEQ ID NO: 135975 - protein, 10 aa, synthetic construct
NHPRGDRSQT

SEQ ID NO: 135976 - protein, 10 aa, synthetic construct
NHLRGDRSQT

SEQ ID NO: 135977 - protein, 10 aa, synthetic construct
NHIRGDRSQT

SEQ ID NO: 135978 - protein, 10 aa, synthetic construct
NHMRGDRSQT

SEQ ID NO: 135979 - protein, 10 aa, synthetic construct
NHWRGDRSQT

SEQ ID NO: 135980 - protein, 10 aa, synthetic construct
NHFRGDRSQT

SEQ ID NO: 135981 - protein, 10 aa, synthetic construct
NHKRGDRSQT

SEQ ID NO: 135982 - protein, 10 aa, synthetic construct
NHRRGDRSQT

SEQ ID NO: 135983 - protein, 10 aa, synthetic construct
NHHRGDRSQT

SEQ ID NO: 135984 - protein, 10 aa, synthetic construct
NHSRGDRSQT

SEQ ID NO: 135985 - protein, 10 aa, synthetic construct
NHTRGDRSQT

SEQ ID NO: 135986 - protein, 10 aa, synthetic construct
NHYRGDRSQT

SEQ ID NO: 135987 - protein, 10 aa, synthetic construct
NHNRGDRSQT

SEQ ID NO: 135988 - protein, 10 aa, synthetic construct
NHQRGDRSQT

SEQ ID NO: 135989 - protein, 10 aa, synthetic construct
NHDRGDRSQT

SEQ ID NO: 135990 - protein, 10 aa, synthetic construct
NHERGDRSQT

SEQ ID NO: 135991 - protein, 10 aa, synthetic construct
NSGRGDRSQT

SEQ ID NO: 135992 - protein, 10 aa, synthetic construct
NSARGDRSQT

SEQ ID NO: 135993 - protein, 10 aa, synthetic construct
NSVRGDRSQT

SEQ ID NO: 135994 - protein, 10 aa, synthetic construct
NSPRGDRSQT

SEQ ID NO: 135995 - protein, 10 aa, synthetic construct
NSLRGDRSQT

SEQ ID NO: 135996 - protein, 10 aa, synthetic construct
NSIRGDRSQT

SEQ ID NO: 135997 - protein, 10 aa, synthetic construct
NSMRGDRSQT

SEQ ID NO: 135998 - protein, 10 aa, synthetic construct
NSWRGDRSQT

SEQ ID NO: 135999 - protein, 10 aa, synthetic construct
NSFRGDRSQT

SEQ ID NO: 136000 - protein, 10 aa, synthetic construct
NSKRGDRSQT

SEQ ID NO: 136001 - protein, 10 aa, synthetic construct
NSRRGDRSQT

SEQ ID NO: 136002 - protein, 10 aa, synthetic construct
NSHRGDRSQT

SEQ ID NO: 136003 - protein, 10 aa, synthetic construct
NSSRGDRSQT

SEQ ID NO: 136004 - protein, 10 aa, synthetic construct
NSTRGDRSQT

SEQ ID NO: 136005 - protein, 10 aa, synthetic construct
NSYRGDRSQT

SEQ ID NO: 136006 - protein, 10 aa, synthetic construct
NSNRGDRSQT

SEQ ID NO: 136007 - protein, 10 aa, synthetic construct
NSQRGDRSQT

SEQ ID NO: 136008 - protein, 10 aa, synthetic construct
NSDRGDRSQT

SEQ ID NO: 136009 - protein, 10 aa, synthetic construct
NSERGDRSQT

SEQ ID NO: 136010 - protein, 10 aa, synthetic construct
NTGRGDRSQT

SEQ ID NO: 136011 - protein, 10 aa, synthetic construct
NTARGDRSQT

SEQ ID NO: 136012 - protein, 10 aa, synthetic construct
NTVRGDRSQT

SEQ ID NO: 136013 - protein, 10 aa, synthetic construct
NTPRGDRSQT

SEQ ID NO: 136014 - protein, 10 aa, synthetic construct
NTLRGDRSQT

SEQ ID NO: 136015 - protein, 10 aa, synthetic construct
NTIRGDRSQT

SEQ ID NO: 136016 - protein, 10 aa, synthetic construct
NTMRGDRSQT

SEQ ID NO: 136017 - protein, 10 aa, synthetic construct
NTWRGDRSQT

SEQ ID NO: 136018 - protein, 10 aa, synthetic construct
NTFRGDRSQT

SEQ ID NO: 136019 - protein, 10 aa, synthetic construct
NTKRGDRSQT

SEQ ID NO: 136020 - protein, 10 aa, synthetic construct
NTRRGDRSQT

SEQ ID NO: 136021 - protein, 10 aa, synthetic construct
NTHRGDRSQT

SEQ ID NO: 136022 - protein, 10 aa, synthetic construct
NTSRGDRSQT

SEQ ID NO: 136023 - protein, 10 aa, synthetic construct
NTTRGDRSQT

SEQ ID NO: 136024 - protein, 10 aa, synthetic construct
NTYRGDRSQT

SEQ ID NO: 136025 - protein, 10 aa, synthetic construct
NTNRGDRSQT

SEQ ID NO: 136026 - protein, 10 aa, synthetic construct
NTQRGDRSQT

SEQ ID NO: 136027 - protein, 10 aa, synthetic construct
NTDRGDRSQT

SEQ ID NO: 136028 - protein, 10 aa, synthetic construct
NTERGDRSQT

SEQ ID NO: 136029 - protein, 10 aa, synthetic construct
NYGRGDRSQT

SEQ ID NO: 136030 - protein, 10 aa, synthetic construct
NYARGDRSQT

SEQ ID NO: 136031 - protein, 10 aa, synthetic construct
NYVRGDRSQT

SEQ ID NO: 136032 - protein, 10 aa, synthetic construct
NYPRGDRSQT

SEQ ID NO: 136033 - protein, 10 aa, synthetic construct
NYLRGDRSQT

SEQ ID NO: 136034 - protein, 10 aa, synthetic construct
NYIRGDRSQT

SEQ ID NO: 136035 - protein, 10 aa, synthetic construct
NYMRGDRSQT

SEQ ID NO: 136036 - protein, 10 aa, synthetic construct
NYWRGDRSQT

SEQ ID NO: 136037 - protein, 10 aa, synthetic construct
NYFRGDRSQT

SEQ ID NO: 136038 - protein, 10 aa, synthetic construct
NYKRGDRSQT

SEQ ID NO: 136039 - protein, 10 aa, synthetic construct
NYRRGDRSQT

SEQ ID NO: 136040 - protein, 10 aa, synthetic construct
NYHRGDRSQT

SEQ ID NO: 136041 - protein, 10 aa, synthetic construct
NYSRGDRSQT

SEQ ID NO: 136042 - protein, 10 aa, synthetic construct
NYTRGDRSQT

SEQ ID NO: 136043 - protein, 10 aa, synthetic construct
NYYRGDRSQT

SEQ ID NO: 136044 - protein, 10 aa, synthetic construct
NYNRGDRSQT

SEQ ID NO: 136045 - protein, 10 aa, synthetic construct
NYQRGDRSQT

SEQ ID NO: 136046 - protein, 10 aa, synthetic construct
NYDRGDRSQT

SEQ ID NO: 136047 - protein, 10 aa, synthetic construct
NYERGDRSQT

SEQ ID NO: 136048 - protein, 10 aa, synthetic construct
NNGRGDRSQT

SEQ ID NO: 136049 - protein, 10 aa, synthetic construct
NNARGDRSQT

SEQ ID NO: 136050 - protein, 10 aa, synthetic construct
NNVRGDRSQT

SEQ ID NO: 136051 - protein, 10 aa, synthetic construct
NNPRGDRSQT

SEQ ID NO: 136052 - protein, 10 aa, synthetic construct
NNLRGDRSQT

SEQ ID NO: 136053 - protein, 10 aa, synthetic construct
NNIRGDRSQT

SEQ ID NO: 136054 - protein, 10 aa, synthetic construct
NNMRGDRSQT

SEQ ID NO: 136055 - protein, 10 aa, synthetic construct
NNWRGDRSQT

SEQ ID NO: 136056 - protein, 10 aa, synthetic construct
NNFRGDRSQT

SEQ ID NO: 136057 - protein, 10 aa, synthetic construct
NNKRGDRSQT

SEQ ID NO: 136058 - protein, 10 aa, synthetic construct
NNRRGDRSQT

SEQ ID NO: 136059 - protein, 10 aa, synthetic construct
NNHRGDRSQT

SEQ ID NO: 136060 - protein, 10 aa, synthetic construct
NNSRGDRSQT

SEQ ID NO: 136061 - protein, 10 aa, synthetic construct
NNTRGDRSQT

SEQ ID NO: 136062 - protein, 10 aa, synthetic construct
NNYRGDRSQT

SEQ ID NO: 136063 - protein, 10 aa, synthetic construct
NNNRGDRSQT

SEQ ID NO: 136064 - protein, 10 aa, synthetic construct
NNQRGDRSQT

SEQ ID NO: 136065 - protein, 10 aa, synthetic construct
NNDRGDRSQT

SEQ ID NO: 136066 - protein, 10 aa, synthetic construct
NNERGDRSQT

SEQ ID NO: 136067 - protein, 10 aa, synthetic construct
NQGRGDRSQT

SEQ ID NO: 136068 - protein, 10 aa, synthetic construct
NQARGDRSQT

SEQ ID NO: 136069 - protein, 10 aa, synthetic construct
NQVRGDRSQT

SEQ ID NO: 136070 - protein, 10 aa, synthetic construct
NQPRGDRSQT

SEQ ID NO: 136071 - protein, 10 aa, synthetic construct
NQLRGDRSQT

SEQ ID NO: 136072 - protein, 10 aa, synthetic construct
NQIRGDRSQT

SEQ ID NO: 136073 - protein, 10 aa, synthetic construct
NQMRGDRSQT

SEQ ID NO: 136074 - protein, 10 aa, synthetic construct
NQWRGDRSQT

SEQ ID NO: 136075 - protein, 10 aa, synthetic construct
NQFRGDRSQT

SEQ ID NO: 136076 - protein, 10 aa, synthetic construct
NQKRGDRSQT

SEQ ID NO: 136077 - protein, 10 aa, synthetic construct
NQRRGDRSQT

SEQ ID NO: 136078 - protein, 10 aa, synthetic construct
NQHRGDRSQT

SEQ ID NO: 136079 - protein, 10 aa, synthetic construct
NQSRGDRSQT

SEQ ID NO: 136080 - protein, 10 aa, synthetic construct
NQTRGDRSQT

SEQ ID NO: 136081 - protein, 10 aa, synthetic construct
NQYRGDRSQT

SEQ ID NO: 136082 - protein, 10 aa, synthetic construct
NQNRGDRSQT

SEQ ID NO: 136083 - protein, 10 aa, synthetic construct
NQQRGDRSQT

SEQ ID NO: 136084 - protein, 10 aa, synthetic construct
NQDRGDRSQT

SEQ ID NO: 136085 - protein, 10 aa, synthetic construct
NQERGDRSQT

SEQ ID NO: 136086 - protein, 10 aa, synthetic construct
NDGRGDRSQT

SEQ ID NO: 136087 - protein, 10 aa, synthetic construct
NDARGDRSQT

SEQ ID NO: 136088 - protein, 10 aa, synthetic construct
NDVRGDRSQT

SEQ ID NO: 136089 - protein, 10 aa, synthetic construct
NDPRGDRSQT

SEQ ID NO: 136090 - protein, 10 aa, synthetic construct
NDLRGDRSQT

SEQ ID NO: 136091 - protein, 10 aa, synthetic construct
NDIRGDRSQT

SEQ ID NO: 136092 - protein, 10 aa, synthetic construct
NDMRGDRSQT

SEQ ID NO: 136093 - protein, 10 aa, synthetic construct
NDWRGDRSQT

SEQ ID NO: 136094 - protein, 10 aa, synthetic construct
NDFRGDRSQT

SEQ ID NO: 136095 - protein, 10 aa, synthetic construct
NDKRGDRSQT

SEQ ID NO: 136096 - protein, 10 aa, synthetic construct
NDRRGDRSQT

SEQ ID NO: 136097 - protein, 10 aa, synthetic construct
NDHRGDRSQT

SEQ ID NO: 136098 - protein, 10 aa, synthetic construct
NDSRGDRSQT

SEQ ID NO: 136099 - protein, 10 aa, synthetic construct
NDTRGDRSQT

SEQ ID NO: 136100 - protein, 10 aa, synthetic construct
NDYRGDRSQT

SEQ ID NO: 136101 - protein, 10 aa, synthetic construct
NDNRGDRSQT

SEQ ID NO: 136102 - protein, 10 aa, synthetic construct
NDQRGDRSQT

SEQ ID NO: 136103 - protein, 10 aa, synthetic construct
NDDRGDRSQT

SEQ ID NO: 136104 - protein, 10 aa, synthetic construct
NDERGDRSQT

SEQ ID NO: 136105 - protein, 10 aa, synthetic construct
NEGRGDRSQT

SEQ ID NO: 136106 - protein, 10 aa, synthetic construct
NEARGDRSQT

SEQ ID NO: 136107 - protein, 10 aa, synthetic construct
NEVRGDRSQT

SEQ ID NO: 136108 - protein, 10 aa, synthetic construct
NEPRGDRSQT

SEQ ID NO: 136109 - protein, 10 aa, synthetic construct
NELRGDRSQT

SEQ ID NO: 136110 - protein, 10 aa, synthetic construct
NEIRGDRSQT

SEQ ID NO: 136111 - protein, 10 aa, synthetic construct
NEMRGDRSQT

SEQ ID NO: 136112 - protein, 10 aa, synthetic construct
NEWRGDRSQT

SEQ ID NO: 136113 - protein, 10 aa, synthetic construct
NEFRGDRSQT

SEQ ID NO: 136114 - protein, 10 aa, synthetic construct
NEKRGDRSQT

SEQ ID NO: 136115 - protein, 10 aa, synthetic construct
NERRGDRSQT

SEQ ID NO: 136116 - protein, 10 aa, synthetic construct
NEHRGDRSQT

SEQ ID NO: 136117 - protein, 10 aa, synthetic construct
NESRGDRSQT

SEQ ID NO: 136118 - protein, 10 aa, synthetic construct
NETRGDRSQT

SEQ ID NO: 136119 - protein, 10 aa, synthetic construct
NEYRGDRSQT

SEQ ID NO: 136120 - protein, 10 aa, synthetic construct
NENRGDRSQT

SEQ ID NO: 136121 - protein, 10 aa, synthetic construct
NEQRGDRSQT

SEQ ID NO: 136122 - protein, 10 aa, synthetic construct
NEDRGDRSQT

SEQ ID NO: 136123 - protein, 10 aa, synthetic construct
NEERGDRSQT

SEQ ID NO: 136124 - protein, 10 aa, synthetic construct
DGGRGDRSQT

SEQ ID NO: 136125 - protein, 10 aa, synthetic construct
DGARGDRSQT

SEQ ID NO: 136126 - protein, 10 aa, synthetic construct
DGVRGDRSQT

SEQ ID NO: 136127 - protein, 10 aa, synthetic construct
DGPRGDRSQT

SEQ ID NO: 136128 - protein, 10 aa, synthetic construct
DGLRGDRSQT

SEQ ID NO: 136129 - protein, 10 aa, synthetic construct
DGIRGDRSQT

SEQ ID NO: 136130 - protein, 10 aa, synthetic construct
DGMRGDRSQT

SEQ ID NO: 136131 - protein, 10 aa, synthetic construct
DGWRGDRSQT

SEQ ID NO: 136132 - protein, 10 aa, synthetic construct
DGFRGDRSQT

SEQ ID NO: 136133 - protein, 10 aa, synthetic construct
DGKRGDRSQT

SEQ ID NO: 136134 - protein, 10 aa, synthetic construct
DGRRGDRSQT

SEQ ID NO: 136135 - protein, 10 aa, synthetic construct
DGHRGDRSQT

SEQ ID NO: 136136 - protein, 10 aa, synthetic construct
DGSRGDRSQT

SEQ ID NO: 136137 - protein, 10 aa, synthetic construct
DGTRGDRSQT

SEQ ID NO: 136138 - protein, 10 aa, synthetic construct
DGYRGDRSQT

SEQ ID NO: 136139 - protein, 10 aa, synthetic construct
DGNRGDRSQT

SEQ ID NO: 136140 - protein, 10 aa, synthetic construct
DGQRGDRSQT

SEQ ID NO: 136141 - protein, 10 aa, synthetic construct
DGDRGDRSQT

SEQ ID NO: 136142 - protein, 10 aa, synthetic construct
DGERGDRSQT

SEQ ID NO: 136143 - protein, 10 aa, synthetic construct
DAGRGDRSQT

SEQ ID NO: 136144 - protein, 10 aa, synthetic construct
DAARGDRSQT

SEQ ID NO: 136145 - protein, 10 aa, synthetic construct
DAVRGDRSQT

SEQ ID NO: 136146 - protein, 10 aa, synthetic construct
DAPRGDRSQT

SEQ ID NO: 136147 - protein, 10 aa, synthetic construct
DALRGDRSQT

SEQ ID NO: 136148 - protein, 10 aa, synthetic construct
DAIRGDRSQT

SEQ ID NO: 136149 - protein, 10 aa, synthetic construct
DAMRGDRSQT

SEQ ID NO: 136150 - protein, 10 aa, synthetic construct
DAWRGDRSQT

SEQ ID NO: 136151 - protein, 10 aa, synthetic construct
DAFRGDRSQT

SEQ ID NO: 136152 - protein, 10 aa, synthetic construct
DAKRGDRSQT

SEQ ID NO: 136153 - protein, 10 aa, synthetic construct
DARRGDRSQT

SEQ ID NO: 136154 - protein, 10 aa, synthetic construct
DAHRGDRSQT

SEQ ID NO: 136155 - protein, 10 aa, synthetic construct
DASRGDRSQT

SEQ ID NO: 136156 - protein, 10 aa, synthetic construct
DATRGDRSQT

SEQ ID NO: 136157 - protein, 10 aa, synthetic construct
DAYRGDRSQT

SEQ ID NO: 136158 - protein, 10 aa, synthetic construct
DANRGDRSQT

SEQ ID NO: 136159 - protein, 10 aa, synthetic construct
DAQRGDRSQT

SEQ ID NO: 136160 - protein, 10 aa, synthetic construct
DADRGDRSQT

SEQ ID NO: 136161 - protein, 10 aa, synthetic construct
DAERGDRSQT

SEQ ID NO: 136162 - protein, 10 aa, synthetic construct
DVGRGDRSQT

SEQ ID NO: 136163 - protein, 10 aa, synthetic construct
DVARGDRSQT

SEQ ID NO: 136164 - protein, 10 aa, synthetic construct
DVVRGDRSQT

SEQ ID NO: 136165 - protein, 10 aa, synthetic construct
DVPRGDRSQT

SEQ ID NO: 136166 - protein, 10 aa, synthetic construct
DVLRGDRSQT

SEQ ID NO: 136167 - protein, 10 aa, synthetic construct
DVIRGDRSQT

SEQ ID NO: 136168 - protein, 10 aa, synthetic construct
DVMRGDRSQT

SEQ ID NO: 136169 - protein, 10 aa, synthetic construct
DVWRGDRSQT

SEQ ID NO: 136170 - protein, 10 aa, synthetic construct
DVFRGDRSQT

SEQ ID NO: 136171 - protein, 10 aa, synthetic construct
DVKRGDRSQT

SEQ ID NO: 136172 - protein, 10 aa, synthetic construct
DVRRGDRSQT

SEQ ID NO: 136173 - protein, 10 aa, synthetic construct
DVHRGDRSQT

SEQ ID NO: 136174 - protein, 10 aa, synthetic construct
DVSRGDRSQT

SEQ ID NO: 136175 - protein, 10 aa, synthetic construct
DVTRGDRSQT

SEQ ID NO: 136176 - protein, 10 aa, synthetic construct
DVYRGDRSQT

SEQ ID NO: 136177 - protein, 10 aa, synthetic construct
DVNRGDRSQT

SEQ ID NO: 136178 - protein, 10 aa, synthetic construct
DVQRGDRSQT

SEQ ID NO: 136179 - protein, 10 aa, synthetic construct
DVDRGDRSQT

SEQ ID NO: 136180 - protein, 10 aa, synthetic construct
DVERGDRSQT

SEQ ID NO: 136181 - protein, 10 aa, synthetic construct
DPGRGDRSQT

SEQ ID NO: 136182 - protein, 10 aa, synthetic construct
DPARGDRSQT

SEQ ID NO: 136183 - protein, 10 aa, synthetic construct
DPVRGDRSQT

SEQ ID NO: 136184 - protein, 10 aa, synthetic construct
DPPRGDRSQT

SEQ ID NO: 136185 - protein, 10 aa, synthetic construct
DPLRGDRSQT

SEQ ID NO: 136186 - protein, 10 aa, synthetic construct
DPIRGDRSQT

SEQ ID NO: 136187 - protein, 10 aa, synthetic construct
DPMRGDRSQT

SEQ ID NO: 136188 - protein, 10 aa, synthetic construct
DPWRGDRSQT

SEQ ID NO: 136189 - protein, 10 aa, synthetic construct
DPFRGDRSQT

SEQ ID NO: 136190 - protein, 10 aa, synthetic construct
DPKRGDRSQT

SEQ ID NO: 136191 - protein, 10 aa, synthetic construct
DPRRGDRSQT

SEQ ID NO: 136192 - protein, 10 aa, synthetic construct
DPHRGDRSQT

SEQ ID NO: 136193 - protein, 10 aa, synthetic construct
DPSRGDRSQT

SEQ ID NO: 136194 - protein, 10 aa, synthetic construct
DPTRGDRSQT

SEQ ID NO: 136195 - protein, 10 aa, synthetic construct
DPYRGDRSQT

SEQ ID NO: 136196 - protein, 10 aa, synthetic construct
DPNRGDRSQT

SEQ ID NO: 136197 - protein, 10 aa, synthetic construct
DPQRGDRSQT

SEQ ID NO: 136198 - protein, 10 aa, synthetic construct
DPDRGDRSQT

SEQ ID NO: 136199 - protein, 10 aa, synthetic construct
DPERGDRSQT

SEQ ID NO: 136200 - protein, 10 aa, synthetic construct
DLGRGDRSQT

SEQ ID NO: 136201 - protein, 10 aa, synthetic construct
DLARGDRSQT

SEQ ID NO: 136202 - protein, 10 aa, synthetic construct
DLVRGDRSQT

SEQ ID NO: 136203 - protein, 10 aa, synthetic construct
DLPRGDRSQT

SEQ ID NO: 136204 - protein, 10 aa, synthetic construct
DLLRGDRSQT

SEQ ID NO: 136205 - protein, 10 aa, synthetic construct
DLIRGDRSQT

SEQ ID NO: 136206 - protein, 10 aa, synthetic construct
DLMRGDRSQT

SEQ ID NO: 136207 - protein, 10 aa, synthetic construct
DLWRGDRSQT

SEQ ID NO: 136208 - protein, 10 aa, synthetic construct
DLFRGDRSQT

SEQ ID NO: 136209 - protein, 10 aa, synthetic construct
DLKRGDRSQT

SEQ ID NO: 136210 - protein, 10 aa, synthetic construct
DLRRGDRSQT

SEQ ID NO: 136211 - protein, 10 aa, synthetic construct
DLHRGDRSQT

SEQ ID NO: 136212 - protein, 10 aa, synthetic construct
DLSRGDRSQT

SEQ ID NO: 136213 - protein, 10 aa, synthetic construct
DLTRGDRSQT

SEQ ID NO: 136214 - protein, 10 aa, synthetic construct
DLYRGDRSQT

SEQ ID NO: 136215 - protein, 10 aa, synthetic construct
DLNRGDRSQT

SEQ ID NO: 136216 - protein, 10 aa, synthetic construct
DLQRGDRSQT

SEQ ID NO: 136217 - protein, 10 aa, synthetic construct
DLDRGDRSQT

SEQ ID NO: 136218 - protein, 10 aa, synthetic construct
DLERGDRSQT

SEQ ID NO: 136219 - protein, 10 aa, synthetic construct
DIGRGDRSQT

SEQ ID NO: 136220 - protein, 10 aa, synthetic construct
DIARGDRSQT

SEQ ID NO: 136221 - protein, 10 aa, synthetic construct
DIVRGDRSQT

SEQ ID NO: 136222 - protein, 10 aa, synthetic construct
DIPRGDRSQT

SEQ ID NO: 136223 - protein, 10 aa, synthetic construct
DILRGDRSQT

SEQ ID NO: 136224 - protein, 10 aa, synthetic construct
DIIRGDRSQT

SEQ ID NO: 136225 - protein, 10 aa, synthetic construct
DIMRGDRSQT

SEQ ID NO: 136226 - protein, 10 aa, synthetic construct
DIWRGDRSQT

SEQ ID NO: 136227 - protein, 10 aa, synthetic construct
DIFRGDRSQT

SEQ ID NO: 136228 - protein, 10 aa, synthetic construct
DIKRGDRSQT

SEQ ID NO: 136229 - protein, 10 aa, synthetic construct
DIRRGDRSQT

SEQ ID NO: 136230 - protein, 10 aa, synthetic construct
DIHRGDRSQT

SEQ ID NO: 136231 - protein, 10 aa, synthetic construct
DISRGDRSQT

SEQ ID NO: 136232 - protein, 10 aa, synthetic construct
DITRGDRSQT

SEQ ID NO: 136233 - protein, 10 aa, synthetic construct
DIYRGDRSQT

SEQ ID NO: 136234 - protein, 10 aa, synthetic construct
DINRGDRSQT

SEQ ID NO: 136235 - protein, 10 aa, synthetic construct
DIQRGDRSQT

SEQ ID NO: 136236 - protein, 10 aa, synthetic construct
DIDRGDRSQT

SEQ ID NO: 136237 - protein, 10 aa, synthetic construct
DIERGDRSQT

SEQ ID NO: 136238 - protein, 10 aa, synthetic construct
DMGRGDRSQT

SEQ ID NO: 136239 - protein, 10 aa, synthetic construct
DMARGDRSQT

SEQ ID NO: 136240 - protein, 10 aa, synthetic construct
DMVRGDRSQT

SEQ ID NO: 136241 - protein, 10 aa, synthetic construct
DMPRGDRSQT

SEQ ID NO: 136242 - protein, 10 aa, synthetic construct
DMLRGDRSQT

SEQ ID NO: 136243 - protein, 10 aa, synthetic construct
DMIRGDRSQT

SEQ ID NO: 136244 - protein, 10 aa, synthetic construct
DMMRGDRSQT

SEQ ID NO: 136245 - protein, 10 aa, synthetic construct
DMWRGDRSQT

SEQ ID NO: 136246 - protein, 10 aa, synthetic construct
DMFRGDRSQT

SEQ ID NO: 136247 - protein, 10 aa, synthetic construct
DMKRGDRSQT

SEQ ID NO: 136248 - protein, 10 aa, synthetic construct
DMRRGDRSQT

SEQ ID NO: 136249 - protein, 10 aa, synthetic construct
DMHRGDRSQT

SEQ ID NO: 136250 - protein, 10 aa, synthetic construct
DMSRGDRSQT

SEQ ID NO: 136251 - protein, 10 aa, synthetic construct
DMTRGDRSQT

SEQ ID NO: 136252 - protein, 10 aa, synthetic construct
DMYRGDRSQT

SEQ ID NO: 136253 - protein, 10 aa, synthetic construct
DMNRGDRSQT

SEQ ID NO: 136254 - protein, 10 aa, synthetic construct
DMQRGDRSQT

SEQ ID NO: 136255 - protein, 10 aa, synthetic construct
DMDRGDRSQT

SEQ ID NO: 136256 - protein, 10 aa, synthetic construct
DMERGDRSQT

SEQ ID NO: 136257 - protein, 10 aa, synthetic construct
DWGRGDRSQT

SEQ ID NO: 136258 - protein, 10 aa, synthetic construct
DWARGDRSQT

SEQ ID NO: 136259 - protein, 10 aa, synthetic construct
DWVRGDRSQT

SEQ ID NO: 136260 - protein, 10 aa, synthetic construct
DWPRGDRSQT

SEQ ID NO: 136261 - protein, 10 aa, synthetic construct
DWLRGDRSQT

SEQ ID NO: 136262 - protein, 10 aa, synthetic construct
DWIRGDRSQT

SEQ ID NO: 136263 - protein, 10 aa, synthetic construct
DWMRGDRSQT

SEQ ID NO: 136264 - protein, 10 aa, synthetic construct
DWWRGDRSQT

SEQ ID NO: 136265 - protein, 10 aa, synthetic construct
DWFRGDRSQT

SEQ ID NO: 136266 - protein, 10 aa, synthetic construct
DWKRGDRSQT

SEQ ID NO: 136267 - protein, 10 aa, synthetic construct
DWRRGDRSQT

SEQ ID NO: 136268 - protein, 10 aa, synthetic construct
DWHRGDRSQT

SEQ ID NO: 136269 - protein, 10 aa, synthetic construct
DWSRGDRSQT

SEQ ID NO: 136270 - protein, 10 aa, synthetic construct
DWTRGDRSQT

SEQ ID NO: 136271 - protein, 10 aa, synthetic construct
DWYRGDRSQT

SEQ ID NO: 136272 - protein, 10 aa, synthetic construct
DWNRGDRSQT

SEQ ID NO: 136273 - protein, 10 aa, synthetic construct
DWQRGDRSQT

SEQ ID NO: 136274 - protein, 10 aa, synthetic construct
DWDRGDRSQT

SEQ ID NO: 136275 - protein, 10 aa, synthetic construct
DWERGDRSQT

SEQ ID NO: 136276 - protein, 10 aa, synthetic construct
DFGRGDRSQT

SEQ ID NO: 136277 - protein, 10 aa, synthetic construct
DFARGDRSQT

SEQ ID NO: 136278 - protein, 10 aa, synthetic construct
DFVRGDRSQT

SEQ ID NO: 136279 - protein, 10 aa, synthetic construct
DFPRGDRSQT

SEQ ID NO: 136280 - protein, 10 aa, synthetic construct
DFLRGDRSQT

SEQ ID NO: 136281 - protein, 10 aa, synthetic construct
DFIRGDRSQT

SEQ ID NO: 136282 - protein, 10 aa, synthetic construct
DFMRGDRSQT

SEQ ID NO: 136283 - protein, 10 aa, synthetic construct
DFWRGDRSQT

SEQ ID NO: 136284 - protein, 10 aa, synthetic construct
DFFRGDRSQT

SEQ ID NO: 136285 - protein, 10 aa, synthetic construct
DFKRGDRSQT

SEQ ID NO: 136286 - protein, 10 aa, synthetic construct
DFRRGDRSQT

SEQ ID NO: 136287 - protein, 10 aa, synthetic construct
DFHRGDRSQT

SEQ ID NO: 136288 - protein, 10 aa, synthetic construct
DFSRGDRSQT

SEQ ID NO: 136289 - protein, 10 aa, synthetic construct
DFTRGDRSQT

SEQ ID NO: 136290 - protein, 10 aa, synthetic construct
DFYRGDRSQT

SEQ ID NO: 136291 - protein, 10 aa, synthetic construct
DFNRGDRSQT

SEQ ID NO: 136292 - protein, 10 aa, synthetic construct
DFQRGDRSQT

SEQ ID NO: 136293 - protein, 10 aa, synthetic construct
DFDRGDRSQT

SEQ ID NO: 136294 - protein, 10 aa, synthetic construct
DFERGDRSQT

SEQ ID NO: 136295 - protein, 10 aa, synthetic construct
DKGRGDRSQT

SEQ ID NO: 136296 - protein, 10 aa, synthetic construct
DKARGDRSQT

SEQ ID NO: 136297 - protein, 10 aa, synthetic construct
DKVRGDRSQT

SEQ ID NO: 136298 - protein, 10 aa, synthetic construct
DKPRGDRSQT

SEQ ID NO: 136299 - protein, 10 aa, synthetic construct
DKLRGDRSQT

SEQ ID NO: 136300 - protein, 10 aa, synthetic construct
DKIRGDRSQT

SEQ ID NO: 136301 - protein, 10 aa, synthetic construct
DKMRGDRSQT

SEQ ID NO: 136302 - protein, 10 aa, synthetic construct
DKWRGDRSQT

SEQ ID NO: 136303 - protein, 10 aa, synthetic construct
DKFRGDRSQT

SEQ ID NO: 136304 - protein, 10 aa, synthetic construct
DKKRGDRSQT

SEQ ID NO: 136305 - protein, 10 aa, synthetic construct
DKRRGDRSQT

SEQ ID NO: 136306 - protein, 10 aa, synthetic construct
DKHRGDRSQT

SEQ ID NO: 136307 - protein, 10 aa, synthetic construct
DKSRGDRSQT

SEQ ID NO: 136308 - protein, 10 aa, synthetic construct
DKTRGDRSQT

SEQ ID NO: 136309 - protein, 10 aa, synthetic construct
DKYRGDRSQT

SEQ ID NO: 136310 - protein, 10 aa, synthetic construct
DKNRGDRSQT

SEQ ID NO: 136311 - protein, 10 aa, synthetic construct
DKQRGDRSQT

SEQ ID NO: 136312 - protein, 10 aa, synthetic construct
DKDRGDRSQT

SEQ ID NO: 136313 - protein, 10 aa, synthetic construct
DKERGDRSQT

SEQ ID NO: 136314 - protein, 10 aa, synthetic construct
DRGRGDRSQT

SEQ ID NO: 136315 - protein, 10 aa, synthetic construct
DRARGDRSQT

SEQ ID NO: 136316 - protein, 10 aa, synthetic construct
DRVRGDRSQT

SEQ ID NO: 136317 - protein, 10 aa, synthetic construct
DRPRGDRSQT

SEQ ID NO: 136318 - protein, 10 aa, synthetic construct
DRLRGDRSQT

SEQ ID NO: 136319 - protein, 10 aa, synthetic construct
DRIRGDRSQT

SEQ ID NO: 136320 - protein, 10 aa, synthetic construct
DRMRGDRSQT

SEQ ID NO: 136321 - protein, 10 aa, synthetic construct
DRWRGDRSQT

SEQ ID NO: 136322 - protein, 10 aa, synthetic construct
DRFRGDRSQT

SEQ ID NO: 136323 - protein, 10 aa, synthetic construct
DRKRGDRSQT

SEQ ID NO: 136324 - protein, 10 aa, synthetic construct
DRRRGDRSQT

SEQ ID NO: 136325 - protein, 10 aa, synthetic construct
DRHRGDRSQT

SEQ ID NO: 136326 - protein, 10 aa, synthetic construct
DRSRGDRSQT

SEQ ID NO: 136327 - protein, 10 aa, synthetic construct
DRTRGDRSQT

SEQ ID NO: 136328 - protein, 10 aa, synthetic construct
DRYRGDRSQT

SEQ ID NO: 136329 - protein, 10 aa, synthetic construct
DRNRGDRSQT

SEQ ID NO: 136330 - protein, 10 aa, synthetic construct
DRQRGDRSQT

SEQ ID NO: 136331 - protein, 10 aa, synthetic construct
DRDRGDRSQT

SEQ ID NO: 136332 - protein, 10 aa, synthetic construct
DRERGDRSQT

SEQ ID NO: 136333 - protein, 10 aa, synthetic construct
DHGRGDRSQT

SEQ ID NO: 136334 - protein, 10 aa, synthetic construct
DHARGDRSQT

SEQ ID NO: 136335 - protein, 10 aa, synthetic construct
DHVRGDRSQT

SEQ ID NO: 136336 - protein, 10 aa, synthetic construct
DHPRGDRSQT

SEQ ID NO: 136337 - protein, 10 aa, synthetic construct
DHLRGDRSQT

SEQ ID NO: 136338 - protein, 10 aa, synthetic construct
DHIRGDRSQT

SEQ ID NO: 136339 - protein, 10 aa, synthetic construct
DHMRGDRSQT

SEQ ID NO: 136340 - protein, 10 aa, synthetic construct
DHWRGDRSQT

SEQ ID NO: 136341 - protein, 10 aa, synthetic construct
DHFRGDRSQT

SEQ ID NO: 136342 - protein, 10 aa, synthetic construct
DHKRGDRSQT

SEQ ID NO: 136343 - protein, 10 aa, synthetic construct
DHRRGDRSQT

SEQ ID NO: 136344 - protein, 10 aa, synthetic construct
DHHRGDRSQT

SEQ ID NO: 136345 - protein, 10 aa, synthetic construct
DHSRGDRSQT

SEQ ID NO: 136346 - protein, 10 aa, synthetic construct
DHTRGDRSQT

SEQ ID NO: 136347 - protein, 10 aa, synthetic construct
DHYRGDRSQT

SEQ ID NO: 136348 - protein, 10 aa, synthetic construct
DHNRGDRSQT

SEQ ID NO: 136349 - protein, 10 aa, synthetic construct
DHQRGDRSQT

SEQ ID NO: 136350 - protein, 10 aa, synthetic construct
DHDRGDRSQT

SEQ ID NO: 136351 - protein, 10 aa, synthetic construct
DHERGDRSQT

SEQ ID NO: 136352 - protein, 10 aa, synthetic construct
DSGRGDRSQT

SEQ ID NO: 136353 - protein, 10 aa, synthetic construct
DSARGDRSQT

SEQ ID NO: 136354 - protein, 10 aa, synthetic construct
DSVRGDRSQT

SEQ ID NO: 136355 - protein, 10 aa, synthetic construct
DSPRGDRSQT

SEQ ID NO: 136356 - protein, 10 aa, synthetic construct
DSLRGDRSQT

SEQ ID NO: 136357 - protein, 10 aa, synthetic construct
DSIRGDRSQT

SEQ ID NO: 136358 - protein, 10 aa, synthetic construct
DSMRGDRSQT

SEQ ID NO: 136359 - protein, 10 aa, synthetic construct
DSWRGDRSQT

SEQ ID NO: 136360 - protein, 10 aa, synthetic construct
DSFRGDRSQT

SEQ ID NO: 136361 - protein, 10 aa, synthetic construct
DSKRGDRSQT

SEQ ID NO: 136362 - protein, 10 aa, synthetic construct
DSRRGDRSQT

SEQ ID NO: 136363 - protein, 10 aa, synthetic construct
DSHRGDRSQT

SEQ ID NO: 136364 - protein, 10 aa, synthetic construct
DSSRGDRSQT

SEQ ID NO: 136365 - protein, 10 aa, synthetic construct
DSTRGDRSQT

SEQ ID NO: 136366 - protein, 10 aa, synthetic construct
DSYRGDRSQT

SEQ ID NO: 136367 - protein, 10 aa, synthetic construct
DSNRGDRSQT

SEQ ID NO: 136368 - protein, 10 aa, synthetic construct
DSQRGDRSQT

SEQ ID NO: 136369 - protein, 10 aa, synthetic construct
DSDRGDRSQT

SEQ ID NO: 136370 - protein, 10 aa, synthetic construct
DSERGDRSQT

SEQ ID NO: 136371 - protein, 10 aa, synthetic construct
DTGRGDRSQT

SEQ ID NO: 136372 - protein, 10 aa, synthetic construct
DTARGDRSQT

SEQ ID NO: 136373 - protein, 10 aa, synthetic construct
DTVRGDRSQT

SEQ ID NO: 136374 - protein, 10 aa, synthetic construct
DTPRGDRSQT

SEQ ID NO: 136375 - protein, 10 aa, synthetic construct
DTLRGDRSQT

SEQ ID NO: 136376 - protein, 10 aa, synthetic construct
DTIRGDRSQT

SEQ ID NO: 136377 - protein, 10 aa, synthetic construct
DTMRGDRSQT

SEQ ID NO: 136378 - protein, 10 aa, synthetic construct
DTWRGDRSQT

SEQ ID NO: 136379 - protein, 10 aa, synthetic construct
DTFRGDRSQT

SEQ ID NO: 136380 - protein, 10 aa, synthetic construct
DTKRGDRSQT

SEQ ID NO: 136381 - protein, 10 aa, synthetic construct
DTRRGDRSQT

SEQ ID NO: 136382 - protein, 10 aa, synthetic construct
DTHRGDRSQT

SEQ ID NO: 136383 - protein, 10 aa, synthetic construct
DTSRGDRSQT

SEQ ID NO: 136384 - protein, 10 aa, synthetic construct
DTTRGDRSQT

SEQ ID NO: 136385 - protein, 10 aa, synthetic construct
DTYRGDRSQT

SEQ ID NO: 136386 - protein, 10 aa, synthetic construct
DTNRGDRSQT

SEQ ID NO: 136387 - protein, 10 aa, synthetic construct
DTQRGDRSQT

SEQ ID NO: 136388 - protein, 10 aa, synthetic construct
DTDRGDRSQT

SEQ ID NO: 136389 - protein, 10 aa, synthetic construct
DTERGDRSQT

SEQ ID NO: 136390 - protein, 10 aa, synthetic construct
DYGRGDRSQT

SEQ ID NO: 136391 - protein, 10 aa, synthetic construct
DYARGDRSQT

SEQ ID NO: 136392 - protein, 10 aa, synthetic construct
DYVRGDRSQT

SEQ ID NO: 136393 - protein, 10 aa, synthetic construct
DYPRGDRSQT

SEQ ID NO: 136394 - protein, 10 aa, synthetic construct
DYLRGDRSQT

SEQ ID NO: 136395 - protein, 10 aa, synthetic construct
DYIRGDRSQT

SEQ ID NO: 136396 - protein, 10 aa, synthetic construct
DYMRGDRSQT

SEQ ID NO: 136397 - protein, 10 aa, synthetic construct
DYWRGDRSQT

SEQ ID NO: 136398 - protein, 10 aa, synthetic construct
DYFRGDRSQT

SEQ ID NO: 136399 - protein, 10 aa, synthetic construct
DYKRGDRSQT

SEQ ID NO: 136400 - protein, 10 aa, synthetic construct
DYRRGDRSQT

SEQ ID NO: 136401 - protein, 10 aa, synthetic construct
DYHRGDRSQT

SEQ ID NO: 136402 - protein, 10 aa, synthetic construct
DYSRGDRSQT

SEQ ID NO: 136403 - protein, 10 aa, synthetic construct
DYTRGDRSQT

SEQ ID NO: 136404 - protein, 10 aa, synthetic construct
DYYRGDRSQT

SEQ ID NO: 136405 - protein, 10 aa, synthetic construct
DYNRGDRSQT

SEQ ID NO: 136406 - protein, 10 aa, synthetic construct
DYQRGDRSQT

SEQ ID NO: 136407 - protein, 10 aa, synthetic construct
DYDRGDRSQT

SEQ ID NO: 136408 - protein, 10 aa, synthetic construct
DYERGDRSQT

SEQ ID NO: 136409 - protein, 10 aa, synthetic construct
DNGRGDRSQT

SEQ ID NO: 136410 - protein, 10 aa, synthetic construct
DNARGDRSQT

SEQ ID NO: 136411 - protein, 10 aa, synthetic construct
DNVRGDRSQT

SEQ ID NO: 136412 - protein, 10 aa, synthetic construct
DNPRGDRSQT

SEQ ID NO: 136413 - protein, 10 aa, synthetic construct
DNLRGDRSQT

SEQ ID NO: 136414 - protein, 10 aa, synthetic construct
DNIRGDRSQT

SEQ ID NO: 136415 - protein, 10 aa, synthetic construct
DNMRGDRSQT

SEQ ID NO: 136416 - protein, 10 aa, synthetic construct
DNWRGDRSQT

SEQ ID NO: 136417 - protein, 10 aa, synthetic construct
DNFRGDRSQT

SEQ ID NO: 136418 - protein, 10 aa, synthetic construct
DNKRGDRSQT

SEQ ID NO: 136419 - protein, 10 aa, synthetic construct
DNRRGDRSQT

SEQ ID NO: 136420 - protein, 10 aa, synthetic construct
DNHRGDRSQT

SEQ ID NO: 136421 - protein, 10 aa, synthetic construct
DNSRGDRSQT

SEQ ID NO: 136422 - protein, 10 aa, synthetic construct
DNTRGDRSQT

SEQ ID NO: 136423 - protein, 10 aa, synthetic construct
DNYRGDRSQT

SEQ ID NO: 136424 - protein, 10 aa, synthetic construct
DNNRGDRSQT

SEQ ID NO: 136425 - protein, 10 aa, synthetic construct
DNQRGDRSQT

SEQ ID NO: 136426 - protein, 10 aa, synthetic construct
DNDRGDRSQT

SEQ ID NO: 136427 - protein, 10 aa, synthetic construct
DNERGDRSQT

SEQ ID NO: 136428 - protein, 10 aa, synthetic construct
DQGRGDRSQT

SEQ ID NO: 136429 - protein, 10 aa, synthetic construct
DQARGDRSQT

SEQ ID NO: 136430 - protein, 10 aa, synthetic construct
DQVRGDRSQT

SEQ ID NO: 136431 - protein, 10 aa, synthetic construct
DQPRGDRSQT

SEQ ID NO: 136432 - protein, 10 aa, synthetic construct
DQLRGDRSQT

SEQ ID NO: 136433 - protein, 10 aa, synthetic construct
DQIRGDRSQT

SEQ ID NO: 136434 - protein, 10 aa, synthetic construct
DQMRGDRSQT

SEQ ID NO: 136435 - protein, 10 aa, synthetic construct
DQWRGDRSQT

SEQ ID NO: 136436 - protein, 10 aa, synthetic construct
DQFRGDRSQT

SEQ ID NO: 136437 - protein, 10 aa, synthetic construct
DQKRGDRSQT

SEQ ID NO: 136438 - protein, 10 aa, synthetic construct
DQRRGDRSQT

SEQ ID NO: 136439 - protein, 10 aa, synthetic construct
DQHRGDRSQT

SEQ ID NO: 136440 - protein, 10 aa, synthetic construct
DQSRGDRSQT

SEQ ID NO: 136441 - protein, 10 aa, synthetic construct
DQTRGDRSQT

SEQ ID NO: 136442 - protein, 10 aa, synthetic construct
DQYRGDRSQT

SEQ ID NO: 136443 - protein, 10 aa, synthetic construct
DQNRGDRSQT

SEQ ID NO: 136444 - protein, 10 aa, synthetic construct
DQQRGDRSQT

SEQ ID NO: 136445 - protein, 10 aa, synthetic construct
DQDRGDRSQT

SEQ ID NO: 136446 - protein, 10 aa, synthetic construct
DQERGDRSQT

SEQ ID NO: 136447 - protein, 10 aa, synthetic construct
DDGRGDRSQT

SEQ ID NO: 136448 - protein, 10 aa, synthetic construct
DDARGDRSQT

SEQ ID NO: 136449 - protein, 10 aa, synthetic construct
DDVRGDRSQT

SEQ ID NO: 136450 - protein, 10 aa, synthetic construct
DDPRGDRSQT

SEQ ID NO: 136451 - protein, 10 aa, synthetic construct
DDLRGDRSQT

SEQ ID NO: 136452 - protein, 10 aa, synthetic construct
DDIRGDRSQT

SEQ ID NO: 136453 - protein, 10 aa, synthetic construct
DDMRGDRSQT

SEQ ID NO: 136454 - protein, 10 aa, synthetic construct
DDWRGDRSQT

SEQ ID NO: 136455 - protein, 10 aa, synthetic construct
DDFRGDRSQT

SEQ ID NO: 136456 - protein, 10 aa, synthetic construct
DDKRGDRSQT

SEQ ID NO: 136457 - protein, 10 aa, synthetic construct
DDRRGDRSQT

SEQ ID NO: 136458 - protein, 10 aa, synthetic construct
DDHRGDRSQT

SEQ ID NO: 136459 - protein, 10 aa, synthetic construct
DDSRGDRSQT

SEQ ID NO: 136460 - protein, 10 aa, synthetic construct
DDTRGDRSQT

SEQ ID NO: 136461 - protein, 10 aa, synthetic construct
DDYRGDRSQT

SEQ ID NO: 136462 - protein, 10 aa, synthetic construct
DDNRGDRSQT

SEQ ID NO: 136463 - protein, 10 aa, synthetic construct
DDQRGDRSQT

SEQ ID NO: 136464 - protein, 10 aa, synthetic construct
DDDRGDRSQT

SEQ ID NO: 136465 - protein, 10 aa, synthetic construct
DDERGDRSQT

SEQ ID NO: 136466 - protein, 10 aa, synthetic construct
DEGRGDRSQT

SEQ ID NO: 136467 - protein, 10 aa, synthetic construct
DEARGDRSQT

SEQ ID NO: 136468 - protein, 10 aa, synthetic construct
DEVRGDRSQT

SEQ ID NO: 136469 - protein, 10 aa, synthetic construct
DEPRGDRSQT

SEQ ID NO: 136470 - protein, 10 aa, synthetic construct
DELRGDRSQT

SEQ ID NO: 136471 - protein, 10 aa, synthetic construct
DEIRGDRSQT

SEQ ID NO: 136472 - protein, 10 aa, synthetic construct
DEMRGDRSQT

SEQ ID NO: 136473 - protein, 10 aa, synthetic construct
DEWRGDRSQT

SEQ ID NO: 136474 - protein, 10 aa, synthetic construct
DEFRGDRSQT

SEQ ID NO: 136475 - protein, 10 aa, synthetic construct
DEKRGDRSQT

SEQ ID NO: 136476 - protein, 10 aa, synthetic construct
DERRGDRSQT

SEQ ID NO: 136477 - protein, 10 aa, synthetic construct
DEHRGDRSQT

SEQ ID NO: 136478 - protein, 10 aa, synthetic construct
DESRGDRSQT

SEQ ID NO: 136479 - protein, 10 aa, synthetic construct
DETRGDRSQT

SEQ ID NO: 136480 - protein, 10 aa, synthetic construct
DEYRGDRSQT

SEQ ID NO: 136481 - protein, 10 aa, synthetic construct
DENRGDRSQT

SEQ ID NO: 136482 - protein, 10 aa, synthetic construct
DEQRGDRSQT

SEQ ID NO: 136483 - protein, 10 aa, synthetic construct
DEDRGDRSQT

SEQ ID NO: 136484 - protein, 10 aa, synthetic construct
DEERGDRSQT

SEQ ID NO: 136485 - protein, 10 aa, synthetic construct
QGGRGDRSQT

SEQ ID NO: 136486 - protein, 10 aa, synthetic construct
QGARGDRSQT

SEQ ID NO: 136487 - protein, 10 aa, synthetic construct
QGVRGDRSQT

SEQ ID NO: 136488 - protein, 10 aa, synthetic construct
QGPRGDRSQT

SEQ ID NO: 136489 - protein, 10 aa, synthetic construct
QGLRGDRSQT

SEQ ID NO: 136490 - protein, 10 aa, synthetic construct
QGIRGDRSQT

SEQ ID NO: 136491 - protein, 10 aa, synthetic construct
QGMRGDRSQT

SEQ ID NO: 136492 - protein, 10 aa, synthetic construct
QGWRGDRSQT

SEQ ID NO: 136493 - protein, 10 aa, synthetic construct
QGFRGDRSQT

SEQ ID NO: 136494 - protein, 10 aa, synthetic construct
QGKRGDRSQT

SEQ ID NO: 136495 - protein, 10 aa, synthetic construct
QGRRGDRSQT

SEQ ID NO: 136496 - protein, 10 aa, synthetic construct
QGHRGDRSQT

SEQ ID NO: 136497 - protein, 10 aa, synthetic construct
QGSRGDRSQT

SEQ ID NO: 136498 - protein, 10 aa, synthetic construct
QGTRGDRSQT

SEQ ID NO: 136499 - protein, 10 aa, synthetic construct
QGYRGDRSQT

SEQ ID NO: 136500 - protein, 10 aa, synthetic construct
QGNRGDRSQT

SEQ ID NO: 136501 - protein, 10 aa, synthetic construct
QGQRGDRSQT

SEQ ID NO: 136502 - protein, 10 aa, synthetic construct
QGDRGDRSQT

SEQ ID NO: 136503 - protein, 10 aa, synthetic construct
QGERGDRSQT

SEQ ID NO: 136504 - protein, 10 aa, synthetic construct
QAGRGDRSQT

SEQ ID NO: 136505 - protein, 10 aa, synthetic construct
QAARGDRSQT

SEQ ID NO: 136506 - protein, 10 aa, synthetic construct
QAVRGDRSQT

SEQ ID NO: 136507 - protein, 10 aa, synthetic construct
QAPRGDRSQT

SEQ ID NO: 136508 - protein, 10 aa, synthetic construct
QALRGDRSQT

SEQ ID NO: 136509 - protein, 10 aa, synthetic construct
QAIRGDRSQT

SEQ ID NO: 136510 - protein, 10 aa, synthetic construct
QAMRGDRSQT

SEQ ID NO: 136511 - protein, 10 aa, synthetic construct
QAWRGDRSQT

SEQ ID NO: 136512 - protein, 10 aa, synthetic construct
QAFRGDRSQT

SEQ ID NO: 136513 - protein, 10 aa, synthetic construct
QAKRGDRSQT

SEQ ID NO: 136514 - protein, 10 aa, synthetic construct
QARRGDRSQT

SEQ ID NO: 136515 - protein, 10 aa, synthetic construct
QAHRGDRSQT

SEQ ID NO: 136516 - protein, 10 aa, synthetic construct
QASRGDRSQT

SEQ ID NO: 136517 - protein, 10 aa, synthetic construct
QATRGDRSQT

SEQ ID NO: 136518 - protein, 10 aa, synthetic construct
QAYRGDRSQT

SEQ ID NO: 136519 - protein, 10 aa, synthetic construct
QANRGDRSQT

SEQ ID NO: 136520 - protein, 10 aa, synthetic construct
QAQRGDRSQT

SEQ ID NO: 136521 - protein, 10 aa, synthetic construct
QADRGDRSQT

SEQ ID NO: 136522 - protein, 10 aa, synthetic construct
QAERGDRSQT

SEQ ID NO: 136523 - protein, 10 aa, synthetic construct
QVGRGDRSQT

SEQ ID NO: 136524 - protein, 10 aa, synthetic construct
QVARGDRSQT

SEQ ID NO: 136525 - protein, 10 aa, synthetic construct
QVVRGDRSQT

SEQ ID NO: 136526 - protein, 10 aa, synthetic construct
QVPRGDRSQT

SEQ ID NO: 136527 - protein, 10 aa, synthetic construct
QVLRGDRSQT

SEQ ID NO: 136528 - protein, 10 aa, synthetic construct
QVIRGDRSQT

SEQ ID NO: 136529 - protein, 10 aa, synthetic construct
QVMRGDRSQT

SEQ ID NO: 136530 - protein, 10 aa, synthetic construct
QVWRGDRSQT

SEQ ID NO: 136531 - protein, 10 aa, synthetic construct
QVFRGDRSQT

SEQ ID NO: 136532 - protein, 10 aa, synthetic construct
QVKRGDRSQT

SEQ ID NO: 136533 - protein, 10 aa, synthetic construct
QVRRGDRSQT

SEQ ID NO: 136534 - protein, 10 aa, synthetic construct
QVHRGDRSQT

SEQ ID NO: 136535 - protein, 10 aa, synthetic construct
QVSRGDRSQT

SEQ ID NO: 136536 - protein, 10 aa, synthetic construct
QVTRGDRSQT

SEQ ID NO: 136537 - protein, 10 aa, synthetic construct
QVYRGDRSQT

SEQ ID NO: 136538 - protein, 10 aa, synthetic construct
QVNRGDRSQT

SEQ ID NO: 136539 - protein, 10 aa, synthetic construct
QVQRGDRSQT

SEQ ID NO: 136540 - protein, 10 aa, synthetic construct
QVDRGDRSQT

SEQ ID NO: 136541 - protein, 10 aa, synthetic construct
QVERGDRSQT

SEQ ID NO: 136542 - protein, 10 aa, synthetic construct
QPGRGDRSQT

SEQ ID NO: 136543 - protein, 10 aa, synthetic construct
QPARGDRSQT

SEQ ID NO: 136544 - protein, 10 aa, synthetic construct
QPVRGDRSQT

SEQ ID NO: 136545 - protein, 10 aa, synthetic construct
QPPRGDRSQT

SEQ ID NO: 136546 - protein, 10 aa, synthetic construct
QPLRGDRSQT

SEQ ID NO: 136547 - protein, 10 aa, synthetic construct
QPIRGDRSQT

SEQ ID NO: 136548 - protein, 10 aa, synthetic construct
QPMRGDRSQT

SEQ ID NO: 136549 - protein, 10 aa, synthetic construct
QPWRGDRSQT

SEQ ID NO: 136550 - protein, 10 aa, synthetic construct
QPFRGDRSQT

SEQ ID NO: 136551 - protein, 10 aa, synthetic construct
QPKRGDRSQT

SEQ ID NO: 136552 - protein, 10 aa, synthetic construct
QPRRGDRSQT

SEQ ID NO: 136553 - protein, 10 aa, synthetic construct
QPHRGDRSQT

SEQ ID NO: 136554 - protein, 10 aa, synthetic construct
QPSRGDRSQT

SEQ ID NO: 136555 - protein, 10 aa, synthetic construct
QPTRGDRSQT

SEQ ID NO: 136556 - protein, 10 aa, synthetic construct
QPYRGDRSQT

SEQ ID NO: 136557 - protein, 10 aa, synthetic construct
QPNRGDRSQT

SEQ ID NO: 136558 - protein, 10 aa, synthetic construct
QPQRGDRSQT

SEQ ID NO: 136559 - protein, 10 aa, synthetic construct
QPDRGDRSQT

SEQ ID NO: 136560 - protein, 10 aa, synthetic construct
QPERGDRSQT

SEQ ID NO: 136561 - protein, 10 aa, synthetic construct
QLGRGDRSQT

SEQ ID NO: 136562 - protein, 10 aa, synthetic construct
QLARGDRSQT

SEQ ID NO: 136563 - protein, 10 aa, synthetic construct
QLVRGDRSQT

SEQ ID NO: 136564 - protein, 10 aa, synthetic construct
QLPRGDRSQT

SEQ ID NO: 136565 - protein, 10 aa, synthetic construct
QLLRGDRSQT

SEQ ID NO: 136566 - protein, 10 aa, synthetic construct
QLIRGDRSQT

SEQ ID NO: 136567 - protein, 10 aa, synthetic construct
QLMRGDRSQT

SEQ ID NO: 136568 - protein, 10 aa, synthetic construct
QLWRGDRSQT

SEQ ID NO: 136569 - protein, 10 aa, synthetic construct
QLFRGDRSQT

SEQ ID NO: 136570 - protein, 10 aa, synthetic construct
QLKRGDRSQT

SEQ ID NO: 136571 - protein, 10 aa, synthetic construct
QLRRGDRSQT

SEQ ID NO: 136572 - protein, 10 aa, synthetic construct
QLHRGDRSQT

SEQ ID NO: 136573 - protein, 10 aa, synthetic construct
QLSRGDRSQT

SEQ ID NO: 136574 - protein, 10 aa, synthetic construct
QLTRGDRSQT

SEQ ID NO: 136575 - protein, 10 aa, synthetic construct
QLYRGDRSQT

SEQ ID NO: 136576 - protein, 10 aa, synthetic construct
QLNRGDRSQT

SEQ ID NO: 136577 - protein, 10 aa, synthetic construct
QLQRGDRSQT

SEQ ID NO: 136578 - protein, 10 aa, synthetic construct
QLDRGDRSQT

SEQ ID NO: 136579 - protein, 10 aa, synthetic construct
QLERGDRSQT

SEQ ID NO: 136580 - protein, 10 aa, synthetic construct
QIGRGDRSQT

SEQ ID NO: 136581 - protein, 10 aa, synthetic construct
QIARGDRSQT

SEQ ID NO: 136582 - protein, 10 aa, synthetic construct
QIVRGDRSQT

SEQ ID NO: 136583 - protein, 10 aa, synthetic construct
QIPRGDRSQT

SEQ ID NO: 136584 - protein, 10 aa, synthetic construct
QILRGDRSQT

SEQ ID NO: 136585 - protein, 10 aa, synthetic construct
QIIRGDRSQT

SEQ ID NO: 136586 - protein, 10 aa, synthetic construct
QIMRGDRSQT

SEQ ID NO: 136587 - protein, 10 aa, synthetic construct
QIWRGDRSQT

SEQ ID NO: 136588 - protein, 10 aa, synthetic construct
QIFRGDRSQT

SEQ ID NO: 136589 - protein, 10 aa, synthetic construct
QIKRGDRSQT

SEQ ID NO: 136590 - protein, 10 aa, synthetic construct
QIRRGDRSQT

SEQ ID NO: 136591 - protein, 10 aa, synthetic construct
QIHRGDRSQT

SEQ ID NO: 136592 - protein, 10 aa, synthetic construct
QISRGDRSQT

SEQ ID NO: 136593 - protein, 10 aa, synthetic construct
QITRGDRSQT

SEQ ID NO: 136594 - protein, 10 aa, synthetic construct
QIYRGDRSQT

SEQ ID NO: 136595 - protein, 10 aa, synthetic construct
QINRGDRSQT

SEQ ID NO: 136596 - protein, 10 aa, synthetic construct
QIQRGDRSQT

SEQ ID NO: 136597 - protein, 10 aa, synthetic construct
QIDRGDRSQT

SEQ ID NO: 136598 - protein, 10 aa, synthetic construct
QIERGDRSQT

SEQ ID NO: 136599 - protein, 10 aa, synthetic construct
QMGRGDRSQT

SEQ ID NO: 136600 - protein, 10 aa, synthetic construct
QMARGDRSQT

SEQ ID NO: 136601 - protein, 10 aa, synthetic construct
QMVRGDRSQT

SEQ ID NO: 136602 - protein, 10 aa, synthetic construct
QMPRGDRSQT

SEQ ID NO: 136603 - protein, 10 aa, synthetic construct
QMLRGDRSQT

SEQ ID NO: 136604 - protein, 10 aa, synthetic construct
QMIRGDRSQT

SEQ ID NO: 136605 - protein, 10 aa, synthetic construct
QMMRGDRSQT

SEQ ID NO: 136606 - protein, 10 aa, synthetic construct
QMWRGDRSQT

SEQ ID NO: 136607 - protein, 10 aa, synthetic construct
QMFRGDRSQT

SEQ ID NO: 136608 - protein, 10 aa, synthetic construct
QMKRGDRSQT

SEQ ID NO: 136609 - protein, 10 aa, synthetic construct
QMRRGDRSQT

SEQ ID NO: 136610 - protein, 10 aa, synthetic construct
QMHRGDRSQT

SEQ ID NO: 136611 - protein, 10 aa, synthetic construct
QMSRGDRSQT

SEQ ID NO: 136612 - protein, 10 aa, synthetic construct
QMTRGDRSQT

SEQ ID NO: 136613 - protein, 10 aa, synthetic construct
QMYRGDRSQT

SEQ ID NO: 136614 - protein, 10 aa, synthetic construct
QMNRGDRSQT

SEQ ID NO: 136615 - protein, 10 aa, synthetic construct
QMQRGDRSQT

SEQ ID NO: 136616 - protein, 10 aa, synthetic construct
QMDRGDRSQT

SEQ ID NO: 136617 - protein, 10 aa, synthetic construct
QMERGDRSQT

SEQ ID NO: 136618 - protein, 10 aa, synthetic construct
QWGRGDRSQT

SEQ ID NO: 136619 - protein, 10 aa, synthetic construct
QWARGDRSQT

SEQ ID NO: 136620 - protein, 10 aa, synthetic construct
QWVRGDRSQT

SEQ ID NO: 136621 - protein, 10 aa, synthetic construct
QWPRGDRSQT

SEQ ID NO: 136622 - protein, 10 aa, synthetic construct
QWLRGDRSQT

SEQ ID NO: 136623 - protein, 10 aa, synthetic construct
QWIRGDRSQT

SEQ ID NO: 136624 - protein, 10 aa, synthetic construct
QWMRGDRSQT

SEQ ID NO: 136625 - protein, 10 aa, synthetic construct
QWWRGDRSQT

SEQ ID NO: 136626 - protein, 10 aa, synthetic construct
QWFRGDRSQT

SEQ ID NO: 136627 - protein, 10 aa, synthetic construct
QWKRGDRSQT

SEQ ID NO: 136628 - protein, 10 aa, synthetic construct
QWRRGDRSQT

SEQ ID NO: 136629 - protein, 10 aa, synthetic construct
QWHRGDRSQT

SEQ ID NO: 136630 - protein, 10 aa, synthetic construct
QWSRGDRSQT

SEQ ID NO: 136631 - protein, 10 aa, synthetic construct
QWTRGDRSQT

SEQ ID NO: 136632 - protein, 10 aa, synthetic construct
QWYRGDRSQT

SEQ ID NO: 136633 - protein, 10 aa, synthetic construct
QWNRGDRSQT

SEQ ID NO: 136634 - protein, 10 aa, synthetic construct
QWQRGDRSQT

SEQ ID NO: 136635 - protein, 10 aa, synthetic construct
QWDRGDRSQT

SEQ ID NO: 136636 - protein, 10 aa, synthetic construct
QWERGDRSQT

SEQ ID NO: 136637 - protein, 10 aa, synthetic construct
QFGRGDRSQT

SEQ ID NO: 136638 - protein, 10 aa, synthetic construct
QFARGDRSQT

SEQ ID NO: 136639 - protein, 10 aa, synthetic construct
QFVRGDRSQT

SEQ ID NO: 136640 - protein, 10 aa, synthetic construct
QFPRGDRSQT

SEQ ID NO: 136641 - protein, 10 aa, synthetic construct
QFLRGDRSQT

SEQ ID NO: 136642 - protein, 10 aa, synthetic construct
QFIRGDRSQT

SEQ ID NO: 136643 - protein, 10 aa, synthetic construct
QFMRGDRSQT

SEQ ID NO: 136644 - protein, 10 aa, synthetic construct
QFWRGDRSQT

SEQ ID NO: 136645 - protein, 10 aa, synthetic construct
QFFRGDRSQT

SEQ ID NO: 136646 - protein, 10 aa, synthetic construct
QFKRGDRSQT

SEQ ID NO: 136647 - protein, 10 aa, synthetic construct
QFRRGDRSQT

SEQ ID NO: 136648 - protein, 10 aa, synthetic construct
QFHRGDRSQT

SEQ ID NO: 136649 - protein, 10 aa, synthetic construct
QFSRGDRSQT

SEQ ID NO: 136650 - protein, 10 aa, synthetic construct
QFTRGDRSQT

SEQ ID NO: 136651 - protein, 10 aa, synthetic construct
QFYRGDRSQT

SEQ ID NO: 136652 - protein, 10 aa, synthetic construct
QFNRGDRSQT

SEQ ID NO: 136653 - protein, 10 aa, synthetic construct
QFQRGDRSQT

SEQ ID NO: 136654 - protein, 10 aa, synthetic construct
QFDRGDRSQT

SEQ ID NO: 136655 - protein, 10 aa, synthetic construct
QFERGDRSQT

SEQ ID NO: 136656 - protein, 10 aa, synthetic construct
QKGRGDRSQT

SEQ ID NO: 136657 - protein, 10 aa, synthetic construct
QKARGDRSQT

SEQ ID NO: 136658 - protein, 10 aa, synthetic construct
QKVRGDRSQT

SEQ ID NO: 136659 - protein, 10 aa, synthetic construct
QKPRGDRSQT

SEQ ID NO: 136660 - protein, 10 aa, synthetic construct
QKLRGDRSQT

SEQ ID NO: 136661 - protein, 10 aa, synthetic construct
QKIRGDRSQT

SEQ ID NO: 136662 - protein, 10 aa, synthetic construct
QKMRGDRSQT

SEQ ID NO: 136663 - protein, 10 aa, synthetic construct
QKWRGDRSQT

SEQ ID NO: 136664 - protein, 10 aa, synthetic construct
QKFRGDRSQT

SEQ ID NO: 136665 - protein, 10 aa, synthetic construct
QKKRGDRSQT

SEQ ID NO: 136666 - protein, 10 aa, synthetic construct
QKRRGDRSQT

SEQ ID NO: 136667 - protein, 10 aa, synthetic construct
QKHRGDRSQT

SEQ ID NO: 136668 - protein, 10 aa, synthetic construct
QKSRGDRSQT

SEQ ID NO: 136669 - protein, 10 aa, synthetic construct
QKTRGDRSQT

SEQ ID NO: 136670 - protein, 10 aa, synthetic construct
QKYRGDRSQT

SEQ ID NO: 136671 - protein, 10 aa, synthetic construct
QKNRGDRSQT

SEQ ID NO: 136672 - protein, 10 aa, synthetic construct
QKQRGDRSQT

SEQ ID NO: 136673 - protein, 10 aa, synthetic construct
QKDRGDRSQT

SEQ ID NO: 136674 - protein, 10 aa, synthetic construct
QKERGDRSQT

SEQ ID NO: 136675 - protein, 10 aa, synthetic construct
QRGRGDRSQT

SEQ ID NO: 136676 - protein, 10 aa, synthetic construct
QRARGDRSQT

SEQ ID NO: 136677 - protein, 10 aa, synthetic construct
QRVRGDRSQT

SEQ ID NO: 136678 - protein, 10 aa, synthetic construct
QRPRGDRSQT

SEQ ID NO: 136679 - protein, 10 aa, synthetic construct
QRLRGDRSQT

SEQ ID NO: 136680 - protein, 10 aa, synthetic construct
QRIRGDRSQT

SEQ ID NO: 136681 - protein, 10 aa, synthetic construct
QRMRGDRSQT

SEQ ID NO: 136682 - protein, 10 aa, synthetic construct
QRWRGDRSQT

SEQ ID NO: 136683 - protein, 10 aa, synthetic construct
QRFRGDRSQT

SEQ ID NO: 136684 - protein, 10 aa, synthetic construct
QRKRGDRSQT

SEQ ID NO: 136685 - protein, 10 aa, synthetic construct
QRRRGDRSQT

SEQ ID NO: 136686 - protein, 10 aa, synthetic construct
QRHRGDRSQT

SEQ ID NO: 136687 - protein, 10 aa, synthetic construct
QRSRGDRSQT

SEQ ID NO: 136688 - protein, 10 aa, synthetic construct
QRTRGDRSQT

SEQ ID NO: 136689 - protein, 10 aa, synthetic construct
QRYRGDRSQT

SEQ ID NO: 136690 - protein, 10 aa, synthetic construct
QRNRGDRSQT

SEQ ID NO: 136691 - protein, 10 aa, synthetic construct
QRQRGDRSQT

SEQ ID NO: 136692 - protein, 10 aa, synthetic construct
QRDRGDRSQT

SEQ ID NO: 136693 - protein, 10 aa, synthetic construct
QRERGDRSQT

SEQ ID NO: 136694 - protein, 10 aa, synthetic construct
QHGRGDRSQT

SEQ ID NO: 136695 - protein, 10 aa, synthetic construct
QHARGDRSQT

SEQ ID NO: 136696 - protein, 10 aa, synthetic construct
QHVRGDRSQT

SEQ ID NO: 136697 - protein, 10 aa, synthetic construct
QHPRGDRSQT

SEQ ID NO: 136698 - protein, 10 aa, synthetic construct
QHLRGDRSQT

SEQ ID NO: 136699 - protein, 10 aa, synthetic construct
QHIRGDRSQT

SEQ ID NO: 136700 - protein, 10 aa, synthetic construct
QHMRGDRSQT

SEQ ID NO: 136701 - protein, 10 aa, synthetic construct
QHWRGDRSQT

SEQ ID NO: 136702 - protein, 10 aa, synthetic construct
QHFRGDRSQT

SEQ ID NO: 136703 - protein, 10 aa, synthetic construct
QHKRGDRSQT

SEQ ID NO: 136704 - protein, 10 aa, synthetic construct
QHRRGDRSQT

SEQ ID NO: 136705 - protein, 10 aa, synthetic construct
QHHRGDRSQT

SEQ ID NO: 136706 - protein, 10 aa, synthetic construct
QHSRGDRSQT

SEQ ID NO: 136707 - protein, 10 aa, synthetic construct
QHTRGDRSQT

SEQ ID NO: 136708 - protein, 10 aa, synthetic construct
QHYRGDRSQT

SEQ ID NO: 136709 - protein, 10 aa, synthetic construct
QHNRGDRSQT

SEQ ID NO: 136710 - protein, 10 aa, synthetic construct
QHQRGDRSQT

SEQ ID NO: 136711 - protein, 10 aa, synthetic construct
QHDRGDRSQT

SEQ ID NO: 136712 - protein, 10 aa, synthetic construct
QHERGDRSQT

SEQ ID NO: 136713 - protein, 10 aa, synthetic construct
QSGRGDRSQT

SEQ ID NO: 136714 - protein, 10 aa, synthetic construct
QSARGDRSQT

SEQ ID NO: 136715 - protein, 10 aa, synthetic construct
QSVRGDRSQT

SEQ ID NO: 136716 - protein, 10 aa, synthetic construct
QSPRGDRSQT

SEQ ID NO: 136717 - protein, 10 aa, synthetic construct
QSLRGDRSQT

SEQ ID NO: 136718 - protein, 10 aa, synthetic construct
QSIRGDRSQT

SEQ ID NO: 136719 - protein, 10 aa, synthetic construct
QSMRGDRSQT

SEQ ID NO: 136720 - protein, 10 aa, synthetic construct
QSWRGDRSQT

SEQ ID NO: 136721 - protein, 10 aa, synthetic construct
QSFRGDRSQT

SEQ ID NO: 136722 - protein, 10 aa, synthetic construct
QSKRGDRSQT

SEQ ID NO: 136723 - protein, 10 aa, synthetic construct
QSRRGDRSQT

SEQ ID NO: 136724 - protein, 10 aa, synthetic construct
QSHRGDRSQT

SEQ ID NO: 136725 - protein, 10 aa, synthetic construct
QSSRGDRSQT

SEQ ID NO: 136726 - protein, 10 aa, synthetic construct
QSTRGDRSQT

SEQ ID NO: 136727 - protein, 10 aa, synthetic construct
QSYRGDRSQT

SEQ ID NO: 136728 - protein, 10 aa, synthetic construct
QSNRGDRSQT

SEQ ID NO: 136729 - protein, 10 aa, synthetic construct
QSQRGDRSQT

SEQ ID NO: 136730 - protein, 10 aa, synthetic construct
QSDRGDRSQT

SEQ ID NO: 136731 - protein, 10 aa, synthetic construct
QSERGDRSQT

SEQ ID NO: 136732 - protein, 10 aa, synthetic construct
QTGRGDRSQT

SEQ ID NO: 136733 - protein, 10 aa, synthetic construct
QTARGDRSQT

SEQ ID NO: 136734 - protein, 10 aa, synthetic construct
QTVRGDRSQT

SEQ ID NO: 136735 - protein, 10 aa, synthetic construct
QTPRGDRSQT

SEQ ID NO: 136736 - protein, 10 aa, synthetic construct
QTLRGDRSQT

SEQ ID NO: 136737 - protein, 10 aa, synthetic construct
QTIRGDRSQT

SEQ ID NO: 136738 - protein, 10 aa, synthetic construct
QTMRGDRSQT

SEQ ID NO: 136739 - protein, 10 aa, synthetic construct
QTWRGDRSQT

SEQ ID NO: 136740 - protein, 10 aa, synthetic construct
QTFRGDRSQT

SEQ ID NO: 136741 - protein, 10 aa, synthetic construct
QTKRGDRSQT

SEQ ID NO: 136742 - protein, 10 aa, synthetic construct
QTRRGDRSQT

SEQ ID NO: 136743 - protein, 10 aa, synthetic construct
QTHRGDRSQT

SEQ ID NO: 136744 - protein, 10 aa, synthetic construct
QTSRGDRSQT

SEQ ID NO: 136745 - protein, 10 aa, synthetic construct
QTTRGDRSQT

SEQ ID NO: 136746 - protein, 10 aa, synthetic construct
QTYRGDRSQT

SEQ ID NO: 136747 - protein, 10 aa, synthetic construct
QTNRGDRSQT

SEQ ID NO: 136748 - protein, 10 aa, synthetic construct
QTQRGDRSQT

SEQ ID NO: 136749 - protein, 10 aa, synthetic construct
QTDRGDRSQT

SEQ ID NO: 136750 - protein, 10 aa, synthetic construct
QTERGDRSQT

SEQ ID NO: 136751 - protein, 10 aa, synthetic construct
QYGRGDRSQT

SEQ ID NO: 136752 - protein, 10 aa, synthetic construct
QYARGDRSQT

SEQ ID NO: 136753 - protein, 10 aa, synthetic construct
QYVRGDRSQT

SEQ ID NO: 136754 - protein, 10 aa, synthetic construct
QYPRGDRSQT

SEQ ID NO: 136755 - protein, 10 aa, synthetic construct
QYLRGDRSQT

SEQ ID NO: 136756 - protein, 10 aa, synthetic construct
QYIRGDRSQT

SEQ ID NO: 136757 - protein, 10 aa, synthetic construct
QYMRGDRSQT

SEQ ID NO: 136758 - protein, 10 aa, synthetic construct
QYWRGDRSQT

SEQ ID NO: 136759 - protein, 10 aa, synthetic construct
QYFRGDRSQT

SEQ ID NO: 136760 - protein, 10 aa, synthetic construct
QYKRGDRSQT

SEQ ID NO: 136761 - protein, 10 aa, synthetic construct
QYRRGDRSQT

SEQ ID NO: 136762 - protein, 10 aa, synthetic construct
QYHRGDRSQT

SEQ ID NO: 136763 - protein, 10 aa, synthetic construct
QYSRGDRSQT

SEQ ID NO: 136764 - protein, 10 aa, synthetic construct
QYTRGDRSQT

SEQ ID NO: 136765 - protein, 10 aa, synthetic construct
QYYRGDRSQT

SEQ ID NO: 136766 - protein, 10 aa, synthetic construct
QYNRGDRSQT

SEQ ID NO: 136767 - protein, 10 aa, synthetic construct
QYQRGDRSQT

SEQ ID NO: 136768 - protein, 10 aa, synthetic construct
QYDRGDRSQT

SEQ ID NO: 136769 - protein, 10 aa, synthetic construct
QYERGDRSQT

SEQ ID NO: 136770 - protein, 10 aa, synthetic construct
QNGRGDRSQT

SEQ ID NO: 136771 - protein, 10 aa, synthetic construct
QNARGDRSQT

SEQ ID NO: 136772 - protein, 10 aa, synthetic construct
QNVRGDRSQT

SEQ ID NO: 136773 - protein, 10 aa, synthetic construct
QNPRGDRSQT

SEQ ID NO: 136774 - protein, 10 aa, synthetic construct
QNLRGDRSQT

SEQ ID NO: 136775 - protein, 10 aa, synthetic construct
QNIRGDRSQT

SEQ ID NO: 136776 - protein, 10 aa, synthetic construct
QNMRGDRSQT

SEQ ID NO: 136777 - protein, 10 aa, synthetic construct
QNWRGDRSQT

SEQ ID NO: 136778 - protein, 10 aa, synthetic construct
QNFRGDRSQT

SEQ ID NO: 136779 - protein, 10 aa, synthetic construct
QNKRGDRSQT

SEQ ID NO: 136780 - protein, 10 aa, synthetic construct
QNRRGDRSQT

SEQ ID NO: 136781 - protein, 10 aa, synthetic construct
QNHRGDRSQT

SEQ ID NO: 136782 - protein, 10 aa, synthetic construct
QNSRGDRSQT

SEQ ID NO: 136783 - protein, 10 aa, synthetic construct
QNTRGDRSQT

SEQ ID NO: 136784 - protein, 10 aa, synthetic construct
QNYRGDRSQT

SEQ ID NO: 136785 - protein, 10 aa, synthetic construct
QNNRGDRSQT

SEQ ID NO: 136786 - protein, 10 aa, synthetic construct
QNQRGDRSQT

SEQ ID NO: 136787 - protein, 10 aa, synthetic construct
QNDRGDRSQT

SEQ ID NO: 136788 - protein, 10 aa, synthetic construct
QNERGDRSQT

SEQ ID NO: 136789 - protein, 10 aa, synthetic construct
QQGRGDRSQT

SEQ ID NO: 136790 - protein, 10 aa, synthetic construct
QQARGDRSQT

SEQ ID NO: 136791 - protein, 10 aa, synthetic construct
QQVRGDRSQT

SEQ ID NO: 136792 - protein, 10 aa, synthetic construct
QQPRGDRSQT

SEQ ID NO: 136793 - protein, 10 aa, synthetic construct
QQLRGDRSQT

SEQ ID NO: 136794 - protein, 10 aa, synthetic construct
QQIRGDRSQT

SEQ ID NO: 136795 - protein, 10 aa, synthetic construct
QQMRGDRSQT

SEQ ID NO: 136796 - protein, 10 aa, synthetic construct
QQWRGDRSQT

SEQ ID NO: 136797 - protein, 10 aa, synthetic construct
QQFRGDRSQT

SEQ ID NO: 136798 - protein, 10 aa, synthetic construct
QQKRGDRSQT

SEQ ID NO: 136799 - protein, 10 aa, synthetic construct
QQRRGDRSQT

SEQ ID NO: 136800 - protein, 10 aa, synthetic construct
QQHRGDRSQT

SEQ ID NO: 136801 - protein, 10 aa, synthetic construct
QQSRGDRSQT

SEQ ID NO: 136802 - protein, 10 aa, synthetic construct
QQTRGDRSQT

SEQ ID NO: 136803 - protein, 10 aa, synthetic construct
QQYRGDRSQT

SEQ ID NO: 136804 - protein, 10 aa, synthetic construct
QQNRGDRSQT

SEQ ID NO: 136805 - protein, 10 aa, synthetic construct
QQQRGDRSQT

SEQ ID NO: 136806 - protein, 10 aa, synthetic construct
QQDRGDRSQT

SEQ ID NO: 136807 - protein, 10 aa, synthetic construct
QQERGDRSQT

SEQ ID NO: 136808 - protein, 10 aa, synthetic construct
QDGRGDRSQT

SEQ ID NO: 136809 - protein, 10 aa, synthetic construct
QDARGDRSQT

SEQ ID NO: 136810 - protein, 10 aa, synthetic construct
QDVRGDRSQT

SEQ ID NO: 136811 - protein, 10 aa, synthetic construct
QDPRGDRSQT

SEQ ID NO: 136812 - protein, 10 aa, synthetic construct
QDLRGDRSQT

SEQ ID NO: 136813 - protein, 10 aa, synthetic construct
QDIRGDRSQT

SEQ ID NO: 136814 - protein, 10 aa, synthetic construct
QDMRGDRSQT

SEQ ID NO: 136815 - protein, 10 aa, synthetic construct
QDWRGDRSQT

SEQ ID NO: 136816 - protein, 10 aa, synthetic construct
QDFRGDRSQT

SEQ ID NO: 136817 - protein, 10 aa, synthetic construct
QDKRGDRSQT

SEQ ID NO: 136818 - protein, 10 aa, synthetic construct
QDRRGDRSQT

SEQ ID NO: 136819 - protein, 10 aa, synthetic construct
QDHRGDRSQT

SEQ ID NO: 136820 - protein, 10 aa, synthetic construct
QDSRGDRSQT

SEQ ID NO: 136821 - protein, 10 aa, synthetic construct
QDTRGDRSQT

SEQ ID NO: 136822 - protein, 10 aa, synthetic construct
QDYRGDRSQT

SEQ ID NO: 136823 - protein, 10 aa, synthetic construct
QDNRGDRSQT

SEQ ID NO: 136824 - protein, 10 aa, synthetic construct
QDQRGDRSQT

SEQ ID NO: 136825 - protein, 10 aa, synthetic construct
QDDRGDRSQT

SEQ ID NO: 136826 - protein, 10 aa, synthetic construct
QDERGDRSQT

SEQ ID NO: 136827 - protein, 10 aa, synthetic construct
QEGRGDRSQT

SEQ ID NO: 136828 - protein, 10 aa, synthetic construct
QEARGDRSQT

SEQ ID NO: 136829 - protein, 10 aa, synthetic construct
QEVRGDRSQT

SEQ ID NO: 136830 - protein, 10 aa, synthetic construct
QEPRGDRSQT

SEQ ID NO: 136831 - protein, 10 aa, synthetic construct
QELRGDRSQT

SEQ ID NO: 136832 - protein, 10 aa, synthetic construct
QEIRGDRSQT

SEQ ID NO: 136833 - protein, 10 aa, synthetic construct
QEMRGDRSQT

SEQ ID NO: 136834 - protein, 10 aa, synthetic construct
QEWRGDRSQT

SEQ ID NO: 136835 - protein, 10 aa, synthetic construct
QEFRGDRSQT

SEQ ID NO: 136836 - protein, 10 aa, synthetic construct
QEKRGDRSQT

SEQ ID NO: 136837 - protein, 10 aa, synthetic construct
QERRGDRSQT

SEQ ID NO: 136838 - protein, 10 aa, synthetic construct
QEHRGDRSQT

SEQ ID NO: 136839 - protein, 10 aa, synthetic construct
QESRGDRSQT

SEQ ID NO: 136840 - protein, 10 aa, synthetic construct
QETRGDRSQT

SEQ ID NO: 136841 - protein, 10 aa, synthetic construct
QEYRGDRSQT

SEQ ID NO: 136842 - protein, 10 aa, synthetic construct
QENRGDRSQT

SEQ ID NO: 136843 - protein, 10 aa, synthetic construct
QEQRGDRSQT

SEQ ID NO: 136844 - protein, 10 aa, synthetic construct
QEDRGDRSQT

SEQ ID NO: 136845 - protein, 10 aa, synthetic construct
QEERGDRSQT

SEQ ID NO: 136846 - protein, 10 aa, synthetic construct
SGGRGDRSVV

SEQ ID NO: 136847 - protein, 10 aa, synthetic construct
SGARGDRSVV

SEQ ID NO: 136848 - protein, 10 aa, synthetic construct
SGVRGDRSVV

SEQ ID NO: 136849 - protein, 10 aa, synthetic construct
SGPRGDRSVV

SEQ ID NO: 136850 - protein, 10 aa, synthetic construct
SGLRGDRSVV

SEQ ID NO: 136851 - protein, 10 aa, synthetic construct
SGIRGDRSVV

SEQ ID NO: 136852 - protein, 10 aa, synthetic construct
SGMRGDRSVV

SEQ ID NO: 136853 - protein, 10 aa, synthetic construct
SGWRGDRSVV

SEQ ID NO: 136854 - protein, 10 aa, synthetic construct
SGFRGDRSVV

SEQ ID NO: 136855 - protein, 10 aa, synthetic construct
SGKRGDRSVV

SEQ ID NO: 136856 - protein, 10 aa, synthetic construct
SGRRGDRSVV

SEQ ID NO: 136857 - protein, 10 aa, synthetic construct
SGHRGDRSVV

SEQ ID NO: 136858 - protein, 10 aa, synthetic construct
SGSRGDRSVV

SEQ ID NO: 136859 - protein, 10 aa, synthetic construct
SGTRGDRSVV

SEQ ID NO: 136860 - protein, 10 aa, synthetic construct
SGYRGDRSVV

SEQ ID NO: 136861 - protein, 10 aa, synthetic construct
SGNRGDRSVV

SEQ ID NO: 136862 - protein, 10 aa, synthetic construct
SGQRGDRSVV

SEQ ID NO: 136863 - protein, 10 aa, synthetic construct
SGDRGDRSVV

SEQ ID NO: 136864 - protein, 10 aa, synthetic construct
SGERGDRSVV

SEQ ID NO: 136865 - protein, 10 aa, synthetic construct
SAGRGDRSVV

SEQ ID NO: 136866 - protein, 10 aa, synthetic construct
SAARGDRSVV

SEQ ID NO: 136867 - protein, 10 aa, synthetic construct
SAVRGDRSVV

SEQ ID NO: 136868 - protein, 10 aa, synthetic construct
SAPRGDRSVV

SEQ ID NO: 136869 - protein, 10 aa, synthetic construct
SALRGDRSVV

SEQ ID NO: 136870 - protein, 10 aa, synthetic construct
SAIRGDRSVV

SEQ ID NO: 136871 - protein, 10 aa, synthetic construct
SAMRGDRSVV

SEQ ID NO: 136872 - protein, 10 aa, synthetic construct
SAWRGDRSVV

SEQ ID NO: 136873 - protein, 10 aa, synthetic construct
SAFRGDRSVV

SEQ ID NO: 136874 - protein, 10 aa, synthetic construct
SAKRGDRSVV

SEQ ID NO: 136875 - protein, 10 aa, synthetic construct
SARRGDRSVV

SEQ ID NO: 136876 - protein, 10 aa, synthetic construct
SAHRGDRSVV

SEQ ID NO: 136877 - protein, 10 aa, synthetic construct
SASRGDRSVV

SEQ ID NO: 136878 - protein, 10 aa, synthetic construct
SATRGDRSVV

SEQ ID NO: 136879 - protein, 10 aa, synthetic construct
SAYRGDRSVV

SEQ ID NO: 136880 - protein, 10 aa, synthetic construct
SANRGDRSVV

SEQ ID NO: 136881 - protein, 10 aa, synthetic construct
SAQRGDRSVV

SEQ ID NO: 136882 - protein, 10 aa, synthetic construct
SADRGDRSVV

SEQ ID NO: 136883 - protein, 10 aa, synthetic construct
SAERGDRSVV

SEQ ID NO: 136884 - protein, 10 aa, synthetic construct
SVGRGDRSVV

SEQ ID NO: 136885 - protein, 10 aa, synthetic construct
SVARGDRSVV

SEQ ID NO: 136886 - protein, 10 aa, synthetic construct
SVVRGDRSVV

SEQ ID NO: 136887 - protein, 10 aa, synthetic construct
SVPRGDRSVV

SEQ ID NO: 136888 - protein, 10 aa, synthetic construct
SVLRGDRSVV

SEQ ID NO: 136889 - protein, 10 aa, synthetic construct
SVIRGDRSVV

SEQ ID NO: 136890 - protein, 10 aa, synthetic construct
SVMRGDRSVV

SEQ ID NO: 136891 - protein, 10 aa, synthetic construct
SVWRGDRSVV

SEQ ID NO: 136892 - protein, 10 aa, synthetic construct
SVFRGDRSVV

SEQ ID NO: 136893 - protein, 10 aa, synthetic construct
SVKRGDRSVV

SEQ ID NO: 136894 - protein, 10 aa, synthetic construct
SVRRGDRSVV

SEQ ID NO: 136895 - protein, 10 aa, synthetic construct
SVHRGDRSVV

SEQ ID NO: 136896 - protein, 10 aa, synthetic construct
SVSRGDRSVV

SEQ ID NO: 136897 - protein, 10 aa, synthetic construct
SVTRGDRSVV

SEQ ID NO: 136898 - protein, 10 aa, synthetic construct
SVYRGDRSVV

SEQ ID NO: 136899 - protein, 10 aa, synthetic construct
SVNRGDRSVV

SEQ ID NO: 136900 - protein, 10 aa, synthetic construct
SVQRGDRSVV

SEQ ID NO: 136901 - protein, 10 aa, synthetic construct
SVDRGDRSVV

SEQ ID NO: 136902 - protein, 10 aa, synthetic construct
SVERGDRSVV

SEQ ID NO: 136903 - protein, 10 aa, synthetic construct
SPGRGDRSVV

SEQ ID NO: 136904 - protein, 10 aa, synthetic construct
SPARGDRSVV

SEQ ID NO: 136905 - protein, 10 aa, synthetic construct
SPVRGDRSVV

SEQ ID NO: 136906 - protein, 10 aa, synthetic construct
SPPRGDRSVV

SEQ ID NO: 136907 - protein, 10 aa, synthetic construct
SPLRGDRSVV

SEQ ID NO: 136908 - protein, 10 aa, synthetic construct
SPIRGDRSVV

SEQ ID NO: 136909 - protein, 10 aa, synthetic construct
SPMRGDRSVV

SEQ ID NO: 136910 - protein, 10 aa, synthetic construct
SPWRGDRSVV

SEQ ID NO: 136911 - protein, 10 aa, synthetic construct
SPFRGDRSVV

SEQ ID NO: 136912 - protein, 10 aa, synthetic construct
SPKRGDRSVV

SEQ ID NO: 136913 - protein, 10 aa, synthetic construct
SPRRGDRSVV

SEQ ID NO: 136914 - protein, 10 aa, synthetic construct
SPHRGDRSVV

SEQ ID NO: 136915 - protein, 10 aa, synthetic construct
SPSRGDRSVV

SEQ ID NO: 136916 - protein, 10 aa, synthetic construct
SPTRGDRSVV

SEQ ID NO: 136917 - protein, 10 aa, synthetic construct
SPYRGDRSVV

SEQ ID NO: 136918 - protein, 10 aa, synthetic construct
SPNRGDRSVV

SEQ ID NO: 136919 - protein, 10 aa, synthetic construct
SPQRGDRSVV

SEQ ID NO: 136920 - protein, 10 aa, synthetic construct
SPDRGDRSVV

SEQ ID NO: 136921 - protein, 10 aa, synthetic construct
SPERGDRSVV

SEQ ID NO: 136922 - protein, 10 aa, synthetic construct
SLGRGDRSVV

SEQ ID NO: 136923 - protein, 10 aa, synthetic construct
SLARGDRSVV

SEQ ID NO: 136924 - protein, 10 aa, synthetic construct
SLVRGDRSVV

SEQ ID NO: 136925 - protein, 10 aa, synthetic construct
SLPRGDRSVV

SEQ ID NO: 136926 - protein, 10 aa, synthetic construct
SLLRGDRSVV

SEQ ID NO: 136927 - protein, 10 aa, synthetic construct
SLIRGDRSVV

SEQ ID NO: 136928 - protein, 10 aa, synthetic construct
SLMRGDRSVV

SEQ ID NO: 136929 - protein, 10 aa, synthetic construct
SLWRGDRSVV

SEQ ID NO: 136930 - protein, 10 aa, synthetic construct
SLFRGDRSVV

SEQ ID NO: 136931 - protein, 10 aa, synthetic construct
SLKRGDRSVV

SEQ ID NO: 136932 - protein, 10 aa, synthetic construct
SLRRGDRSVV

SEQ ID NO: 136933 - protein, 10 aa, synthetic construct
SLHRGDRSVV

SEQ ID NO: 136934 - protein, 10 aa, synthetic construct
SLSRGDRSVV

SEQ ID NO: 136935 - protein, 10 aa, synthetic construct
SLTRGDRSVV

SEQ ID NO: 136936 - protein, 10 aa, synthetic construct
SLYRGDRSVV

SEQ ID NO: 136937 - protein, 10 aa, synthetic construct
SLNRGDRSVV

SEQ ID NO: 136938 - protein, 10 aa, synthetic construct
SLQRGDRSVV

SEQ ID NO: 136939 - protein, 10 aa, synthetic construct
SLDRGDRSVV

SEQ ID NO: 136940 - protein, 10 aa, synthetic construct
SLERGDRSVV

SEQ ID NO: 136941 - protein, 10 aa, synthetic construct
SIGRGDRSVV

SEQ ID NO: 136942 - protein, 10 aa, synthetic construct
SIARGDRSVV

SEQ ID NO: 136943 - protein, 10 aa, synthetic construct
SIVRGDRSVV

SEQ ID NO: 136944 - protein, 10 aa, synthetic construct
SIPRGDRSVV

SEQ ID NO: 136945 - protein, 10 aa, synthetic construct
SILRGDRSVV

SEQ ID NO: 136946 - protein, 10 aa, synthetic construct
SIIRGDRSVV

SEQ ID NO: 136947 - protein, 10 aa, synthetic construct
SIMRGDRSVV

SEQ ID NO: 136948 - protein, 10 aa, synthetic construct
SIWRGDRSVV

SEQ ID NO: 136949 - protein, 10 aa, synthetic construct
SIFRGDRSVV

SEQ ID NO: 136950 - protein, 10 aa, synthetic construct
SIKRGDRSVV

SEQ ID NO: 136951 - protein, 10 aa, synthetic construct
SIRRGDRSVV

SEQ ID NO: 136952 - protein, 10 aa, synthetic construct
SIHRGDRSVV

SEQ ID NO: 136953 - protein, 10 aa, synthetic construct
SISRGDRSVV

SEQ ID NO: 136954 - protein, 10 aa, synthetic construct
SITRGDRSVV

SEQ ID NO: 136955 - protein, 10 aa, synthetic construct
SIYRGDRSVV

SEQ ID NO: 136956 - protein, 10 aa, synthetic construct
SINRGDRSVV

SEQ ID NO: 136957 - protein, 10 aa, synthetic construct
SIQRGDRSVV

SEQ ID NO: 136958 - protein, 10 aa, synthetic construct
SIDRGDRSVV

SEQ ID NO: 136959 - protein, 10 aa, synthetic construct
SIERGDRSVV

SEQ ID NO: 136960 - protein, 10 aa, synthetic construct
SMGRGDRSVV

SEQ ID NO: 136961 - protein, 10 aa, synthetic construct
SMARGDRSVV

SEQ ID NO: 136962 - protein, 10 aa, synthetic construct
SMVRGDRSVV

SEQ ID NO: 136963 - protein, 10 aa, synthetic construct
SMPRGDRSVV

SEQ ID NO: 136964 - protein, 10 aa, synthetic construct
SMLRGDRSVV

SEQ ID NO: 136965 - protein, 10 aa, synthetic construct
SMIRGDRSVV

SEQ ID NO: 136966 - protein, 10 aa, synthetic construct
SMMRGDRSVV

SEQ ID NO: 136967 - protein, 10 aa, synthetic construct
SMWRGDRSVV

SEQ ID NO: 136968 - protein, 10 aa, synthetic construct
SMFRGDRSVV

SEQ ID NO: 136969 - protein, 10 aa, synthetic construct
SMKRGDRSVV

SEQ ID NO: 136970 - protein, 10 aa, synthetic construct
SMRRGDRSVV

SEQ ID NO: 136971 - protein, 10 aa, synthetic construct
SMHRGDRSVV

SEQ ID NO: 136972 - protein, 10 aa, synthetic construct
SMSRGDRSVV

SEQ ID NO: 136973 - protein, 10 aa, synthetic construct
SMTRGDRSVV

SEQ ID NO: 136974 - protein, 10 aa, synthetic construct
SMYRGDRSVV

SEQ ID NO: 136975 - protein, 10 aa, synthetic construct
SMNRGDRSVV

SEQ ID NO: 136976 - protein, 10 aa, synthetic construct
SMQRGDRSVV

SEQ ID NO: 136977 - protein, 10 aa, synthetic construct
SMDRGDRSVV

SEQ ID NO: 136978 - protein, 10 aa, synthetic construct
SMERGDRSVV

SEQ ID NO: 136979 - protein, 10 aa, synthetic construct
SWGRGDRSVV

SEQ ID NO: 136980 - protein, 10 aa, synthetic construct
SWARGDRSVV

SEQ ID NO: 136981 - protein, 10 aa, synthetic construct
SWVRGDRSVV

SEQ ID NO: 136982 - protein, 10 aa, synthetic construct
SWPRGDRSVV

SEQ ID NO: 136983 - protein, 10 aa, synthetic construct
SWLRGDRSVV

SEQ ID NO: 136984 - protein, 10 aa, synthetic construct
SWIRGDRSVV

SEQ ID NO: 136985 - protein, 10 aa, synthetic construct
SWMRGDRSVV

SEQ ID NO: 136986 - protein, 10 aa, synthetic construct
SWWRGDRSVV

SEQ ID NO: 136987 - protein, 10 aa, synthetic construct
SWFRGDRSVV

SEQ ID NO: 136988 - protein, 10 aa, synthetic construct
SWKRGDRSVV

SEQ ID NO: 136989 - protein, 10 aa, synthetic construct
SWRRGDRSVV

SEQ ID NO: 136990 - protein, 10 aa, synthetic construct
SWHRGDRSVV

SEQ ID NO: 136991 - protein, 10 aa, synthetic construct
SWSRGDRSVV

SEQ ID NO: 136992 - protein, 10 aa, synthetic construct
SWTRGDRSVV

SEQ ID NO: 136993 - protein, 10 aa, synthetic construct
SWYRGDRSVV

SEQ ID NO: 136994 - protein, 10 aa, synthetic construct
SWNRGDRSVV

SEQ ID NO: 136995 - protein, 10 aa, synthetic construct
SWQRGDRSVV

SEQ ID NO: 136996 - protein, 10 aa, synthetic construct
SWDRGDRSVV

SEQ ID NO: 136997 - protein, 10 aa, synthetic construct
SWERGDRSVV

SEQ ID NO: 136998 - protein, 10 aa, synthetic construct
SFGRGDRSVV

SEQ ID NO: 136999 - protein, 10 aa, synthetic construct
SFARGDRSVV

SEQ ID NO: 137000 - protein, 10 aa, synthetic construct
SFVRGDRSVV

SEQ ID NO: 137001 - protein, 10 aa, synthetic construct
SFPRGDRSVV

SEQ ID NO: 137002 - protein, 10 aa, synthetic construct
SFLRGDRSVV

SEQ ID NO: 137003 - protein, 10 aa, synthetic construct
SFIRGDRSVV

SEQ ID NO: 137004 - protein, 10 aa, synthetic construct
SFMRGDRSVV

SEQ ID NO: 137005 - protein, 10 aa, synthetic construct
SFWRGDRSVV

SEQ ID NO: 137006 - protein, 10 aa, synthetic construct
SFFRGDRSVV

SEQ ID NO: 137007 - protein, 10 aa, synthetic construct
SFKRGDRSVV

SEQ ID NO: 137008 - protein, 10 aa, synthetic construct
SFRRGDRSVV

SEQ ID NO: 137009 - protein, 10 aa, synthetic construct
SFHRGDRSVV

SEQ ID NO: 137010 - protein, 10 aa, synthetic construct
SFSRGDRSVV

SEQ ID NO: 137011 - protein, 10 aa, synthetic construct
SFTRGDRSVV

SEQ ID NO: 137012 - protein, 10 aa, synthetic construct
SFYRGDRSVV

SEQ ID NO: 137013 - protein, 10 aa, synthetic construct
SFNRGDRSVV

SEQ ID NO: 137014 - protein, 10 aa, synthetic construct
SFQRGDRSVV

SEQ ID NO: 137015 - protein, 10 aa, synthetic construct
SFDRGDRSVV

SEQ ID NO: 137016 - protein, 10 aa, synthetic construct
SFERGDRSVV

SEQ ID NO: 137017 - protein, 10 aa, synthetic construct
SKGRGDRSVV

SEQ ID NO: 137018 - protein, 10 aa, synthetic construct
SKARGDRSVV

SEQ ID NO: 137019 - protein, 10 aa, synthetic construct
SKVRGDRSVV

SEQ ID NO: 137020 - protein, 10 aa, synthetic construct
SKPRGDRSVV

SEQ ID NO: 137021 - protein, 10 aa, synthetic construct
SKLRGDRSVV

SEQ ID NO: 137022 - protein, 10 aa, synthetic construct
SKIRGDRSVV

SEQ ID NO: 137023 - protein, 10 aa, synthetic construct
SKMRGDRSVV

SEQ ID NO: 137024 - protein, 10 aa, synthetic construct
SKWRGDRSVV

SEQ ID NO: 137025 - protein, 10 aa, synthetic construct
SKFRGDRSVV

SEQ ID NO: 137026 - protein, 10 aa, synthetic construct
SKKRGDRSVV

SEQ ID NO: 137027 - protein, 10 aa, synthetic construct
SKRRGDRSVV

SEQ ID NO: 137028 - protein, 10 aa, synthetic construct
SKHRGDRSVV

SEQ ID NO: 137029 - protein, 10 aa, synthetic construct
SKSRGDRSVV

SEQ ID NO: 137030 - protein, 10 aa, synthetic construct
SKTRGDRSVV

SEQ ID NO: 137031 - protein, 10 aa, synthetic construct
SKYRGDRSVV

SEQ ID NO: 137032 - protein, 10 aa, synthetic construct
SKNRGDRSVV

SEQ ID NO: 137033 - protein, 10 aa, synthetic construct
SKQRGDRSVV

SEQ ID NO: 137034 - protein, 10 aa, synthetic construct
SKDRGDRSVV

SEQ ID NO: 137035 - protein, 10 aa, synthetic construct
SKERGDRSVV

SEQ ID NO: 137036 - protein, 10 aa, synthetic construct
SRGRGDRSVV

SEQ ID NO: 137037 - protein, 10 aa, synthetic construct
SRARGDRSVV

SEQ ID NO: 137038 - protein, 10 aa, synthetic construct
SRVRGDRSVV

SEQ ID NO: 137039 - protein, 10 aa, synthetic construct
SRPRGDRSVV

SEQ ID NO: 137040 - protein, 10 aa, synthetic construct
SRLRGDRSVV

SEQ ID NO: 137041 - protein, 10 aa, synthetic construct
SRIRGDRSVV

SEQ ID NO: 137042 - protein, 10 aa, synthetic construct
SRMRGDRSVV

SEQ ID NO: 137043 - protein, 10 aa, synthetic construct
SRWRGDRSVV

SEQ ID NO: 137044 - protein, 10 aa, synthetic construct
SRFRGDRSVV

SEQ ID NO: 137045 - protein, 10 aa, synthetic construct
SRKRGDRSVV

SEQ ID NO: 137046 - protein, 10 aa, synthetic construct
SRRRGDRSVV

SEQ ID NO: 137047 - protein, 10 aa, synthetic construct
SRHRGDRSVV

SEQ ID NO: 137048 - protein, 10 aa, synthetic construct
SRSRGDRSVV

SEQ ID NO: 137049 - protein, 10 aa, synthetic construct
SRTRGDRSVV

SEQ ID NO: 137050 - protein, 10 aa, synthetic construct
SRYRGDRSVV

SEQ ID NO: 137051 - protein, 10 aa, synthetic construct
SRNRGDRSVV

SEQ ID NO: 137052 - protein, 10 aa, synthetic construct
SRQRGDRSVV

SEQ ID NO: 137053 - protein, 10 aa, synthetic construct
SRDRGDRSVV

SEQ ID NO: 137054 - protein, 10 aa, synthetic construct
SRERGDRSVV

SEQ ID NO: 137055 - protein, 10 aa, synthetic construct
SHGRGDRSVV

SEQ ID NO: 137056 - protein, 10 aa, synthetic construct
SHARGDRSVV

SEQ ID NO: 137057 - protein, 10 aa, synthetic construct
SHVRGDRSVV

SEQ ID NO: 137058 - protein, 10 aa, synthetic construct
SHPRGDRSVV

SEQ ID NO: 137059 - protein, 10 aa, synthetic construct
SHLRGDRSVV

SEQ ID NO: 137060 - protein, 10 aa, synthetic construct
SHIRGDRSVV

SEQ ID NO: 137061 - protein, 10 aa, synthetic construct
SHMRGDRSVV

SEQ ID NO: 137062 - protein, 10 aa, synthetic construct
SHWRGDRSVV

SEQ ID NO: 137063 - protein, 10 aa, synthetic construct
SHFRGDRSVV

SEQ ID NO: 137064 - protein, 10 aa, synthetic construct
SHKRGDRSVV

SEQ ID NO: 137065 - protein, 10 aa, synthetic construct
SHRRGDRSVV

SEQ ID NO: 137066 - protein, 10 aa, synthetic construct
SHHRGDRSVV

SEQ ID NO: 137067 - protein, 10 aa, synthetic construct
SHSRGDRSVV

SEQ ID NO: 137068 - protein, 10 aa, synthetic construct
SHTRGDRSVV

SEQ ID NO: 137069 - protein, 10 aa, synthetic construct
SHYRGDRSVV

SEQ ID NO: 137070 - protein, 10 aa, synthetic construct
SHNRGDRSVV

SEQ ID NO: 137071 - protein, 10 aa, synthetic construct
SHQRGDRSVV

SEQ ID NO: 137072 - protein, 10 aa, synthetic construct
SHDRGDRSVV

SEQ ID NO: 137073 - protein, 10 aa, synthetic construct
SHERGDRSVV

SEQ ID NO: 137074 - protein, 10 aa, synthetic construct
SSGRGDRSVV

SEQ ID NO: 137075 - protein, 10 aa, synthetic construct
SSARGDRSVV

SEQ ID NO: 137076 - protein, 10 aa, synthetic construct
SSVRGDRSVV

SEQ ID NO: 137077 - protein, 10 aa, synthetic construct
SSPRGDRSVV

SEQ ID NO: 137078 - protein, 10 aa, synthetic construct
SSLRGDRSVV

SEQ ID NO: 137079 - protein, 10 aa, synthetic construct
SSIRGDRSVV

SEQ ID NO: 137080 - protein, 10 aa, synthetic construct
SSMRGDRSVV

SEQ ID NO: 137081 - protein, 10 aa, synthetic construct
SSWRGDRSVV

SEQ ID NO: 137082 - protein, 10 aa, synthetic construct
SSFRGDRSVV

SEQ ID NO: 137083 - protein, 10 aa, synthetic construct
SSKRGDRSVV

SEQ ID NO: 137084 - protein, 10 aa, synthetic construct
SSRRGDRSVV

SEQ ID NO: 137085 - protein, 10 aa, synthetic construct
SSHRGDRSVV

SEQ ID NO: 137086 - protein, 10 aa, synthetic construct
SSSRGDRSVV

SEQ ID NO: 137087 - protein, 10 aa, synthetic construct
SSTRGDRSVV

SEQ ID NO: 137088 - protein, 10 aa, synthetic construct
SSYRGDRSVV

SEQ ID NO: 137089 - protein, 10 aa, synthetic construct
SSNRGDRSVV

SEQ ID NO: 137090 - protein, 10 aa, synthetic construct
SSQRGDRSVV

SEQ ID NO: 137091 - protein, 10 aa, synthetic construct
SSDRGDRSVV

SEQ ID NO: 137092 - protein, 10 aa, synthetic construct
SSERGDRSVV

SEQ ID NO: 137093 - protein, 10 aa, synthetic construct
STGRGDRSVV

SEQ ID NO: 137094 - protein, 10 aa, synthetic construct
STARGDRSVV

SEQ ID NO: 137095 - protein, 10 aa, synthetic construct
STVRGDRSVV

SEQ ID NO: 137096 - protein, 10 aa, synthetic construct
STPRGDRSVV

SEQ ID NO: 137097 - protein, 10 aa, synthetic construct
STLRGDRSVV

SEQ ID NO: 137098 - protein, 10 aa, synthetic construct
STIRGDRSVV

SEQ ID NO: 137099 - protein, 10 aa, synthetic construct
STMRGDRSVV

SEQ ID NO: 137100 - protein, 10 aa, synthetic construct
STWRGDRSVV

SEQ ID NO: 137101 - protein, 10 aa, synthetic construct
STFRGDRSVV

SEQ ID NO: 137102 - protein, 10 aa, synthetic construct
STKRGDRSVV

SEQ ID NO: 137103 - protein, 10 aa, synthetic construct
STRRGDRSVV

SEQ ID NO: 137104 - protein, 10 aa, synthetic construct
STHRGDRSVV

SEQ ID NO: 137105 - protein, 10 aa, synthetic construct
STSRGDRSVV

SEQ ID NO: 137106 - protein, 10 aa, synthetic construct
STTRGDRSVV

SEQ ID NO: 137107 - protein, 10 aa, synthetic construct
STYRGDRSVV

SEQ ID NO: 137108 - protein, 10 aa, synthetic construct
STNRGDRSVV

SEQ ID NO: 137109 - protein, 10 aa, synthetic construct
STQRGDRSVV

SEQ ID NO: 137110 - protein, 10 aa, synthetic construct
STDRGDRSVV

SEQ ID NO: 137111 - protein, 10 aa, synthetic construct
STERGDRSVV

SEQ ID NO: 137112 - protein, 10 aa, synthetic construct
SYGRGDRSVV

SEQ ID NO: 137113 - protein, 10 aa, synthetic construct
SYARGDRSVV

SEQ ID NO: 137114 - protein, 10 aa, synthetic construct
SYVRGDRSVV

SEQ ID NO: 137115 - protein, 10 aa, synthetic construct
SYPRGDRSVV

SEQ ID NO: 137116 - protein, 10 aa, synthetic construct
SYLRGDRSVV

SEQ ID NO: 137117 - protein, 10 aa, synthetic construct
SYIRGDRSVV

SEQ ID NO: 137118 - protein, 10 aa, synthetic construct
SYMRGDRSVV

SEQ ID NO: 137119 - protein, 10 aa, synthetic construct
SYWRGDRSVV

SEQ ID NO: 137120 - protein, 10 aa, synthetic construct
SYFRGDRSVV

SEQ ID NO: 137121 - protein, 10 aa, synthetic construct
SYKRGDRSVV

SEQ ID NO: 137122 - protein, 10 aa, synthetic construct
SYRRGDRSVV

SEQ ID NO: 137123 - protein, 10 aa, synthetic construct
SYHRGDRSVV

SEQ ID NO: 137124 - protein, 10 aa, synthetic construct
SYSRGDRSVV

SEQ ID NO: 137125 - protein, 10 aa, synthetic construct
SYTRGDRSVV

SEQ ID NO: 137126 - protein, 10 aa, synthetic construct
SYYRGDRSVV

SEQ ID NO: 137127 - protein, 10 aa, synthetic construct
SYNRGDRSVV

SEQ ID NO: 137128 - protein, 10 aa, synthetic construct
SYQRGDRSVV

SEQ ID NO: 137129 - protein, 10 aa, synthetic construct
SYDRGDRSVV

SEQ ID NO: 137130 - protein, 10 aa, synthetic construct
SYERGDRSVV

SEQ ID NO: 137131 - protein, 10 aa, synthetic construct
SNGRGDRSVV

SEQ ID NO: 137132 - protein, 10 aa, synthetic construct
SNARGDRSVV

SEQ ID NO: 137133 - protein, 10 aa, synthetic construct
SNVRGDRSVV

SEQ ID NO: 137134 - protein, 10 aa, synthetic construct
SNPRGDRSVV

SEQ ID NO: 137135 - protein, 10 aa, synthetic construct
SNLRGDRSVV

SEQ ID NO: 137136 - protein, 10 aa, synthetic construct
SNIRGDRSVV

SEQ ID NO: 137137 - protein, 10 aa, synthetic construct
SNMRGDRSVV

SEQ ID NO: 137138 - protein, 10 aa, synthetic construct
SNWRGDRSVV

SEQ ID NO: 137139 - protein, 10 aa, synthetic construct
SNFRGDRSVV

SEQ ID NO: 137140 - protein, 10 aa, synthetic construct
SNKRGDRSVV

SEQ ID NO: 137141 - protein, 10 aa, synthetic construct
SNRRGDRSVV

SEQ ID NO: 137142 - protein, 10 aa, synthetic construct
SNHRGDRSVV

SEQ ID NO: 137143 - protein, 10 aa, synthetic construct
SNSRGDRSVV

SEQ ID NO: 137144 - protein, 10 aa, synthetic construct
SNTRGDRSVV

SEQ ID NO: 137145 - protein, 10 aa, synthetic construct
SNYRGDRSVV

SEQ ID NO: 137146 - protein, 10 aa, synthetic construct
SNNRGDRSVV

SEQ ID NO: 137147 - protein, 10 aa, synthetic construct
SNQRGDRSVV

SEQ ID NO: 137148 - protein, 10 aa, synthetic construct
SNDRGDRSVV

SEQ ID NO: 137149 - protein, 10 aa, synthetic construct
SNERGDRSVV

SEQ ID NO: 137150 - protein, 10 aa, synthetic construct
SQGRGDRSVV

SEQ ID NO: 137151 - protein, 10 aa, synthetic construct
SQARGDRSVV

SEQ ID NO: 137152 - protein, 10 aa, synthetic construct
SQVRGDRSVV

SEQ ID NO: 137153 - protein, 10 aa, synthetic construct
SQPRGDRSVV

SEQ ID NO: 137154 - protein, 10 aa, synthetic construct
SQLRGDRSVV

SEQ ID NO: 137155 - protein, 10 aa, synthetic construct
SQIRGDRSVV

SEQ ID NO: 137156 - protein, 10 aa, synthetic construct
SQMRGDRSVV

SEQ ID NO: 137157 - protein, 10 aa, synthetic construct
SQWRGDRSVV

SEQ ID NO: 137158 - protein, 10 aa, synthetic construct
SQFRGDRSVV

SEQ ID NO: 137159 - protein, 10 aa, synthetic construct
SQKRGDRSVV

SEQ ID NO: 137160 - protein, 10 aa, synthetic construct
SQRRGDRSVV

SEQ ID NO: 137161 - protein, 10 aa, synthetic construct
SQHRGDRSVV

SEQ ID NO: 137162 - protein, 10 aa, synthetic construct
SQSRGDRSVV

SEQ ID NO: 137163 - protein, 10 aa, synthetic construct
SQTRGDRSVV

SEQ ID NO: 137164 - protein, 10 aa, synthetic construct
SQYRGDRSVV

SEQ ID NO: 137165 - protein, 10 aa, synthetic construct
SQNRGDRSVV

SEQ ID NO: 137166 - protein, 10 aa, synthetic construct
SQQRGDRSVV

SEQ ID NO: 137167 - protein, 10 aa, synthetic construct
SQDRGDRSVV

SEQ ID NO: 137168 - protein, 10 aa, synthetic construct
SQERGDRSVV

SEQ ID NO: 137169 - protein, 10 aa, synthetic construct
SDGRGDRSVV

SEQ ID NO: 137170 - protein, 10 aa, synthetic construct
SDARGDRSVV

SEQ ID NO: 137171 - protein, 10 aa, synthetic construct
SDVRGDRSVV

SEQ ID NO: 137172 - protein, 10 aa, synthetic construct
SDPRGDRSVV

SEQ ID NO: 137173 - protein, 10 aa, synthetic construct
SDLRGDRSVV

SEQ ID NO: 137174 - protein, 10 aa, synthetic construct
SDIRGDRSVV

SEQ ID NO: 137175 - protein, 10 aa, synthetic construct
SDMRGDRSVV

SEQ ID NO: 137176 - protein, 10 aa, synthetic construct
SDWRGDRSVV

SEQ ID NO: 137177 - protein, 10 aa, synthetic construct
SDFRGDRSVV

SEQ ID NO: 137178 - protein, 10 aa, synthetic construct
SDKRGDRSVV

SEQ ID NO: 137179 - protein, 10 aa, synthetic construct
SDRRGDRSVV

SEQ ID NO: 137180 - protein, 10 aa, synthetic construct
SDHRGDRSVV

SEQ ID NO: 137181 - protein, 10 aa, synthetic construct
SDSRGDRSVV

SEQ ID NO: 137182 - protein, 10 aa, synthetic construct
SDTRGDRSVV

SEQ ID NO: 137183 - protein, 10 aa, synthetic construct
SDYRGDRSVV

SEQ ID NO: 137184 - protein, 10 aa, synthetic construct
SDNRGDRSVV

SEQ ID NO: 137185 - protein, 10 aa, synthetic construct
SDQRGDRSVV

SEQ ID NO: 137186 - protein, 10 aa, synthetic construct
SDDRGDRSVV

SEQ ID NO: 137187 - protein, 10 aa, synthetic construct
SDERGDRSVV

SEQ ID NO: 137188 - protein, 10 aa, synthetic construct
SEGRGDRSVV

SEQ ID NO: 137189 - protein, 10 aa, synthetic construct
SEARGDRSVV

SEQ ID NO: 137190 - protein, 10 aa, synthetic construct
SEVRGDRSVV

SEQ ID NO: 137191 - protein, 10 aa, synthetic construct
SEPRGDRSVV

SEQ ID NO: 137192 - protein, 10 aa, synthetic construct
SELRGDRSVV

SEQ ID NO: 137193 - protein, 10 aa, synthetic construct
SEIRGDRSVV

SEQ ID NO: 137194 - protein, 10 aa, synthetic construct
SEMRGDRSVV

SEQ ID NO: 137195 - protein, 10 aa, synthetic construct
SEWRGDRSVV

SEQ ID NO: 137196 - protein, 10 aa, synthetic construct
SEFRGDRSVV

SEQ ID NO: 137197 - protein, 10 aa, synthetic construct
SEKRGDRSVV

SEQ ID NO: 137198 - protein, 10 aa, synthetic construct
SERRGDRSVV

SEQ ID NO: 137199 - protein, 10 aa, synthetic construct
SEHRGDRSVV

SEQ ID NO: 137200 - protein, 10 aa, synthetic construct
SESRGDRSVV

SEQ ID NO: 137201 - protein, 10 aa, synthetic construct
SETRGDRSVV

SEQ ID NO: 137202 - protein, 10 aa, synthetic construct
SEYRGDRSVV

SEQ ID NO: 137203 - protein, 10 aa, synthetic construct
SENRGDRSVV

SEQ ID NO: 137204 - protein, 10 aa, synthetic construct
SEQRGDRSVV

SEQ ID NO: 137205 - protein, 10 aa, synthetic construct
SEDRGDRSVV

SEQ ID NO: 137206 - protein, 10 aa, synthetic construct
SEERGDRSVV

SEQ ID NO: 137207 - protein, 10 aa, synthetic construct
TGGRGDRSVV

SEQ ID NO: 137208 - protein, 10 aa, synthetic construct
TGARGDRSVV

SEQ ID NO: 137209 - protein, 10 aa, synthetic construct
TGVRGDRSVV

SEQ ID NO: 137210 - protein, 10 aa, synthetic construct
TGPRGDRSVV

SEQ ID NO: 137211 - protein, 10 aa, synthetic construct
TGLRGDRSVV

SEQ ID NO: 137212 - protein, 10 aa, synthetic construct
TGIRGDRSVV

SEQ ID NO: 137213 - protein, 10 aa, synthetic construct
TGMRGDRSVV

SEQ ID NO: 137214 - protein, 10 aa, synthetic construct
TGWRGDRSVV

SEQ ID NO: 137215 - protein, 10 aa, synthetic construct
TGFRGDRSVV

SEQ ID NO: 137216 - protein, 10 aa, synthetic construct
TGKRGDRSVV

SEQ ID NO: 137217 - protein, 10 aa, synthetic construct
TGRRGDRSVV

SEQ ID NO: 137218 - protein, 10 aa, synthetic construct
TGHRGDRSVV

SEQ ID NO: 137219 - protein, 10 aa, synthetic construct
TGSRGDRSVV

SEQ ID NO: 137220 - protein, 10 aa, synthetic construct
TGTRGDRSVV

SEQ ID NO: 137221 - protein, 10 aa, synthetic construct
TGYRGDRSVV

SEQ ID NO: 137222 - protein, 10 aa, synthetic construct
TGNRGDRSVV

SEQ ID NO: 137223 - protein, 10 aa, synthetic construct
TGQRGDRSVV

SEQ ID NO: 137224 - protein, 10 aa, synthetic construct
TGDRGDRSVV

SEQ ID NO: 137225 - protein, 10 aa, synthetic construct
TGERGDRSVV

SEQ ID NO: 137226 - protein, 10 aa, synthetic construct
TAGRGDRSVV

SEQ ID NO: 137227 - protein, 10 aa, synthetic construct
TAARGDRSVV

SEQ ID NO: 137228 - protein, 10 aa, synthetic construct
TAVRGDRSVV

SEQ ID NO: 137229 - protein, 10 aa, synthetic construct
TAPRGDRSVV

SEQ ID NO: 137230 - protein, 10 aa, synthetic construct
TALRGDRSVV

SEQ ID NO: 137231 - protein, 10 aa, synthetic construct
TAIRGDRSVV

SEQ ID NO: 137232 - protein, 10 aa, synthetic construct
TAMRGDRSVV

SEQ ID NO: 137233 - protein, 10 aa, synthetic construct
TAWRGDRSVV

SEQ ID NO: 137234 - protein, 10 aa, synthetic construct
TAFRGDRSVV

SEQ ID NO: 137235 - protein, 10 aa, synthetic construct
TAKRGDRSVV

SEQ ID NO: 137236 - protein, 10 aa, synthetic construct
TARRGDRSVV

SEQ ID NO: 137237 - protein, 10 aa, synthetic construct
TAHRGDRSVV

SEQ ID NO: 137238 - protein, 10 aa, synthetic construct
TASRGDRSVV

SEQ ID NO: 137239 - protein, 10 aa, synthetic construct
TATRGDRSVV

SEQ ID NO: 137240 - protein, 10 aa, synthetic construct
TAYRGDRSVV

SEQ ID NO: 137241 - protein, 10 aa, synthetic construct
TANRGDRSVV

SEQ ID NO: 137242 - protein, 10 aa, synthetic construct
TAQRGDRSVV

SEQ ID NO: 137243 - protein, 10 aa, synthetic construct
TADRGDRSVV

SEQ ID NO: 137244 - protein, 10 aa, synthetic construct
TAERGDRSVV

SEQ ID NO: 137245 - protein, 10 aa, synthetic construct
TVGRGDRSVV

SEQ ID NO: 137246 - protein, 10 aa, synthetic construct
TVARGDRSVV

SEQ ID NO: 137247 - protein, 10 aa, synthetic construct
TVVRGDRSVV

SEQ ID NO: 137248 - protein, 10 aa, synthetic construct
TVPRGDRSVV

SEQ ID NO: 137249 - protein, 10 aa, synthetic construct
TVLRGDRSVV

SEQ ID NO: 137250 - protein, 10 aa, synthetic construct
TVIRGDRSVV

SEQ ID NO: 137251 - protein, 10 aa, synthetic construct
TVMRGDRSVV

SEQ ID NO: 137252 - protein, 10 aa, synthetic construct
TVWRGDRSVV

SEQ ID NO: 137253 - protein, 10 aa, synthetic construct
TVFRGDRSVV

SEQ ID NO: 137254 - protein, 10 aa, synthetic construct
TVKRGDRSVV

SEQ ID NO: 137255 - protein, 10 aa, synthetic construct
TVRRGDRSVV

SEQ ID NO: 137256 - protein, 10 aa, synthetic construct
TVHRGDRSVV

SEQ ID NO: 137257 - protein, 10 aa, synthetic construct
TVSRGDRSVV

SEQ ID NO: 137258 - protein, 10 aa, synthetic construct
TVTRGDRSVV

SEQ ID NO: 137259 - protein, 10 aa, synthetic construct
TVYRGDRSVV

SEQ ID NO: 137260 - protein, 10 aa, synthetic construct
TVNRGDRSVV

SEQ ID NO: 137261 - protein, 10 aa, synthetic construct
TVQRGDRSVV

SEQ ID NO: 137262 - protein, 10 aa, synthetic construct
TVDRGDRSVV

SEQ ID NO: 137263 - protein, 10 aa, synthetic construct
TVERGDRSVV

SEQ ID NO: 137264 - protein, 10 aa, synthetic construct
TPGRGDRSVV

SEQ ID NO: 137265 - protein, 10 aa, synthetic construct
TPARGDRSVV

SEQ ID NO: 137266 - protein, 10 aa, synthetic construct
TPVRGDRSVV

SEQ ID NO: 137267 - protein, 10 aa, synthetic construct
TPPRGDRSVV

SEQ ID NO: 137268 - protein, 10 aa, synthetic construct
TPLRGDRSVV

SEQ ID NO: 137269 - protein, 10 aa, synthetic construct
TPIRGDRSVV

SEQ ID NO: 137270 - protein, 10 aa, synthetic construct
TPMRGDRSVV

SEQ ID NO: 137271 - protein, 10 aa, synthetic construct
TPWRGDRSVV

SEQ ID NO: 137272 - protein, 10 aa, synthetic construct
TPFRGDRSVV

SEQ ID NO: 137273 - protein, 10 aa, synthetic construct
TPKRGDRSVV

SEQ ID NO: 137274 - protein, 10 aa, synthetic construct
TPRRGDRSVV

SEQ ID NO: 137275 - protein, 10 aa, synthetic construct
TPHRGDRSVV

SEQ ID NO: 137276 - protein, 10 aa, synthetic construct
TPSRGDRSVV

SEQ ID NO: 137277 - protein, 10 aa, synthetic construct
TPTRGDRSVV

SEQ ID NO: 137278 - protein, 10 aa, synthetic construct
TPYRGDRSVV

SEQ ID NO: 137279 - protein, 10 aa, synthetic construct
TPNRGDRSVV

SEQ ID NO: 137280 - protein, 10 aa, synthetic construct
TPQRGDRSVV

SEQ ID NO: 137281 - protein, 10 aa, synthetic construct
TPDRGDRSVV

SEQ ID NO: 137282 - protein, 10 aa, synthetic construct
TPERGDRSVV

SEQ ID NO: 137283 - protein, 10 aa, synthetic construct
TLGRGDRSVV

SEQ ID NO: 137284 - protein, 10 aa, synthetic construct
TLARGDRSVV

SEQ ID NO: 137285 - protein, 10 aa, synthetic construct
TLVRGDRSVV

SEQ ID NO: 137286 - protein, 10 aa, synthetic construct
TLPRGDRSVV

SEQ ID NO: 137287 - protein, 10 aa, synthetic construct
TLLRGDRSVV

SEQ ID NO: 137288 - protein, 10 aa, synthetic construct
TLIRGDRSVV

SEQ ID NO: 137289 - protein, 10 aa, synthetic construct
TLMRGDRSVV

SEQ ID NO: 137290 - protein, 10 aa, synthetic construct
TLWRGDRSVV

SEQ ID NO: 137291 - protein, 10 aa, synthetic construct
TLFRGDRSVV

SEQ ID NO: 137292 - protein, 10 aa, synthetic construct
TLKRGDRSVV

SEQ ID NO: 137293 - protein, 10 aa, synthetic construct
TLRRGDRSVV

SEQ ID NO: 137294 - protein, 10 aa, synthetic construct
TLHRGDRSVV

SEQ ID NO: 137295 - protein, 10 aa, synthetic construct
TLSRGDRSVV

SEQ ID NO: 137296 - protein, 10 aa, synthetic construct
TLTRGDRSVV

SEQ ID NO: 137297 - protein, 10 aa, synthetic construct
TLYRGDRSVV

SEQ ID NO: 137298 - protein, 10 aa, synthetic construct
TLNRGDRSVV

SEQ ID NO: 137299 - protein, 10 aa, synthetic construct
TLQRGDRSVV

SEQ ID NO: 137300 - protein, 10 aa, synthetic construct
TLDRGDRSVV

SEQ ID NO: 137301 - protein, 10 aa, synthetic construct
TLERGDRSVV

SEQ ID NO: 137302 - protein, 10 aa, synthetic construct
TIGRGDRSVV

SEQ ID NO: 137303 - protein, 10 aa, synthetic construct
TIARGDRSVV

SEQ ID NO: 137304 - protein, 10 aa, synthetic construct
TIVRGDRSVV

SEQ ID NO: 137305 - protein, 10 aa, synthetic construct
TIPRGDRSVV

SEQ ID NO: 137306 - protein, 10 aa, synthetic construct
TILRGDRSVV

SEQ ID NO: 137307 - protein, 10 aa, synthetic construct
TIIRGDRSVV

SEQ ID NO: 137308 - protein, 10 aa, synthetic construct
TIMRGDRSVV

SEQ ID NO: 137309 - protein, 10 aa, synthetic construct
TIWRGDRSVV

SEQ ID NO: 137310 - protein, 10 aa, synthetic construct
TIFRGDRSVV

SEQ ID NO: 137311 - protein, 10 aa, synthetic construct
TIKRGDRSVV

SEQ ID NO: 137312 - protein, 10 aa, synthetic construct
TIRRGDRSVV

SEQ ID NO: 137313 - protein, 10 aa, synthetic construct
TIHRGDRSVV

SEQ ID NO: 137314 - protein, 10 aa, synthetic construct
TISRGDRSVV

SEQ ID NO: 137315 - protein, 10 aa, synthetic construct
TITRGDRSVV

SEQ ID NO: 137316 - protein, 10 aa, synthetic construct
TIYRGDRSVV

SEQ ID NO: 137317 - protein, 10 aa, synthetic construct
TINRGDRSVV

SEQ ID NO: 137318 - protein, 10 aa, synthetic construct
TIQRGDRSVV

SEQ ID NO: 137319 - protein, 10 aa, synthetic construct
TIDRGDRSVV

SEQ ID NO: 137320 - protein, 10 aa, synthetic construct
TIERGDRSVV

SEQ ID NO: 137321 - protein, 10 aa, synthetic construct
TMGRGDRSVV

SEQ ID NO: 137322 - protein, 10 aa, synthetic construct
TMARGDRSVV

SEQ ID NO: 137323 - protein, 10 aa, synthetic construct
TMVRGDRSVV

SEQ ID NO: 137324 - protein, 10 aa, synthetic construct
TMPRGDRSVV

SEQ ID NO: 137325 - protein, 10 aa, synthetic construct
TMLRGDRSVV

SEQ ID NO: 137326 - protein, 10 aa, synthetic construct
TMIRGDRSVV

SEQ ID NO: 137327 - protein, 10 aa, synthetic construct
TMMRGDRSVV

SEQ ID NO: 137328 - protein, 10 aa, synthetic construct
TMWRGDRSVV

SEQ ID NO: 137329 - protein, 10 aa, synthetic construct
TMFRGDRSVV

SEQ ID NO: 137330 - protein, 10 aa, synthetic construct
TMKRGDRSVV

SEQ ID NO: 137331 - protein, 10 aa, synthetic construct
TMRRGDRSVV

SEQ ID NO: 137332 - protein, 10 aa, synthetic construct
TMHRGDRSVV

SEQ ID NO: 137333 - protein, 10 aa, synthetic construct
TMSRGDRSVV

SEQ ID NO: 137334 - protein, 10 aa, synthetic construct
TMTRGDRSVV

SEQ ID NO: 137335 - protein, 10 aa, synthetic construct
TMYRGDRSVV

SEQ ID NO: 137336 - protein, 10 aa, synthetic construct
TMNRGDRSVV

SEQ ID NO: 137337 - protein, 10 aa, synthetic construct
TMQRGDRSVV

SEQ ID NO: 137338 - protein, 10 aa, synthetic construct
TMDRGDRSVV

SEQ ID NO: 137339 - protein, 10 aa, synthetic construct
TMERGDRSVV

SEQ ID NO: 137340 - protein, 10 aa, synthetic construct
TWGRGDRSVV

SEQ ID NO: 137341 - protein, 10 aa, synthetic construct
TWARGDRSVV

SEQ ID NO: 137342 - protein, 10 aa, synthetic construct
TWVRGDRSVV

SEQ ID NO: 137343 - protein, 10 aa, synthetic construct
TWPRGDRSVV

SEQ ID NO: 137344 - protein, 10 aa, synthetic construct
TWLRGDRSVV

SEQ ID NO: 137345 - protein, 10 aa, synthetic construct
TWIRGDRSVV

SEQ ID NO: 137346 - protein, 10 aa, synthetic construct
TWMRGDRSVV

SEQ ID NO: 137347 - protein, 10 aa, synthetic construct
TWWRGDRSVV

SEQ ID NO: 137348 - protein, 10 aa, synthetic construct
TWFRGDRSVV

SEQ ID NO: 137349 - protein, 10 aa, synthetic construct
TWKRGDRSVV

SEQ ID NO: 137350 - protein, 10 aa, synthetic construct
TWRRGDRSVV

SEQ ID NO: 137351 - protein, 10 aa, synthetic construct
TWHRGDRSVV

SEQ ID NO: 137352 - protein, 10 aa, synthetic construct
TWSRGDRSVV

SEQ ID NO: 137353 - protein, 10 aa, synthetic construct
TWTRGDRSVV

SEQ ID NO: 137354 - protein, 10 aa, synthetic construct
TWYRGDRSVV

SEQ ID NO: 137355 - protein, 10 aa, synthetic construct
TWNRGDRSVV

SEQ ID NO: 137356 - protein, 10 aa, synthetic construct
TWQRGDRSVV

SEQ ID NO: 137357 - protein, 10 aa, synthetic construct
TWDRGDRSVV

SEQ ID NO: 137358 - protein, 10 aa, synthetic construct
TWERGDRSVV

SEQ ID NO: 137359 - protein, 10 aa, synthetic construct
TFGRGDRSVV

SEQ ID NO: 137360 - protein, 10 aa, synthetic construct
TFARGDRSVV

SEQ ID NO: 137361 - protein, 10 aa, synthetic construct
TFVRGDRSVV

SEQ ID NO: 137362 - protein, 10 aa, synthetic construct
TFPRGDRSVV

SEQ ID NO: 137363 - protein, 10 aa, synthetic construct
TFLRGDRSVV

SEQ ID NO: 137364 - protein, 10 aa, synthetic construct
TFIRGDRSVV

SEQ ID NO: 137365 - protein, 10 aa, synthetic construct
TFMRGDRSVV

SEQ ID NO: 137366 - protein, 10 aa, synthetic construct
TFWRGDRSVV

SEQ ID NO: 137367 - protein, 10 aa, synthetic construct
TFFRGDRSVV

SEQ ID NO: 137368 - protein, 10 aa, synthetic construct
TFKRGDRSVV

SEQ ID NO: 137369 - protein, 10 aa, synthetic construct
TFRRGDRSVV

SEQ ID NO: 137370 - protein, 10 aa, synthetic construct
TFHRGDRSVV

SEQ ID NO: 137371 - protein, 10 aa, synthetic construct
TFSRGDRSVV

SEQ ID NO: 137372 - protein, 10 aa, synthetic construct
TFTRGDRSVV

SEQ ID NO: 137373 - protein, 10 aa, synthetic construct
TFYRGDRSVV

SEQ ID NO: 137374 - protein, 10 aa, synthetic construct
TFNRGDRSVV

SEQ ID NO: 137375 - protein, 10 aa, synthetic construct
TFQRGDRSVV

SEQ ID NO: 137376 - protein, 10 aa, synthetic construct
TFDRGDRSVV

SEQ ID NO: 137377 - protein, 10 aa, synthetic construct
TFERGDRSVV

SEQ ID NO: 137378 - protein, 10 aa, synthetic construct
TKGRGDRSVV

SEQ ID NO: 137379 - protein, 10 aa, synthetic construct
TKARGDRSVV

SEQ ID NO: 137380 - protein, 10 aa, synthetic construct
TKVRGDRSVV

SEQ ID NO: 137381 - protein, 10 aa, synthetic construct
TKPRGDRSVV

SEQ ID NO: 137382 - protein, 10 aa, synthetic construct
TKLRGDRSVV

SEQ ID NO: 137383 - protein, 10 aa, synthetic construct
TKIRGDRSVV

SEQ ID NO: 137384 - protein, 10 aa, synthetic construct
TKMRGDRSVV

SEQ ID NO: 137385 - protein, 10 aa, synthetic construct
TKWRGDRSVV

SEQ ID NO: 137386 - protein, 10 aa, synthetic construct
TKFRGDRSVV

SEQ ID NO: 137387 - protein, 10 aa, synthetic construct
TKKRGDRSVV

SEQ ID NO: 137388 - protein, 10 aa, synthetic construct
TKRRGDRSVV

SEQ ID NO: 137389 - protein, 10 aa, synthetic construct
TKHRGDRSVV

SEQ ID NO: 137390 - protein, 10 aa, synthetic construct
TKSRGDRSVV

SEQ ID NO: 137391 - protein, 10 aa, synthetic construct
TKTRGDRSVV

SEQ ID NO: 137392 - protein, 10 aa, synthetic construct
TKYRGDRSVV

SEQ ID NO: 137393 - protein, 10 aa, synthetic construct
TKNRGDRSVV

SEQ ID NO: 137394 - protein, 10 aa, synthetic construct
TKQRGDRSVV

SEQ ID NO: 137395 - protein, 10 aa, synthetic construct
TKDRGDRSVV

SEQ ID NO: 137396 - protein, 10 aa, synthetic construct
TKERGDRSVV

SEQ ID NO: 137397 - protein, 10 aa, synthetic construct
TRGRGDRSVV

SEQ ID NO: 137398 - protein, 10 aa, synthetic construct
TRARGDRSVV

SEQ ID NO: 137399 - protein, 10 aa, synthetic construct
TRVRGDRSVV

SEQ ID NO: 137400 - protein, 10 aa, synthetic construct
TRPRGDRSVV

SEQ ID NO: 137401 - protein, 10 aa, synthetic construct
TRLRGDRSVV

SEQ ID NO: 137402 - protein, 10 aa, synthetic construct
TRIRGDRSVV

SEQ ID NO: 137403 - protein, 10 aa, synthetic construct
TRMRGDRSVV

SEQ ID NO: 137404 - protein, 10 aa, synthetic construct
TRWRGDRSVV

SEQ ID NO: 137405 - protein, 10 aa, synthetic construct
TRFRGDRSVV

SEQ ID NO: 137406 - protein, 10 aa, synthetic construct
TRKRGDRSVV

SEQ ID NO: 137407 - protein, 10 aa, synthetic construct
TRRRGDRSVV

SEQ ID NO: 137408 - protein, 10 aa, synthetic construct
TRHRGDRSVV

SEQ ID NO: 137409 - protein, 10 aa, synthetic construct
TRSRGDRSVV

SEQ ID NO: 137410 - protein, 10 aa, synthetic construct
TRTRGDRSVV

SEQ ID NO: 137411 - protein, 10 aa, synthetic construct
TRYRGDRSVV

SEQ ID NO: 137412 - protein, 10 aa, synthetic construct
TRNRGDRSVV

SEQ ID NO: 137413 - protein, 10 aa, synthetic construct
TRQRGDRSVV

SEQ ID NO: 137414 - protein, 10 aa, synthetic construct
TRDRGDRSVV

SEQ ID NO: 137415 - protein, 10 aa, synthetic construct
TRERGDRSVV

SEQ ID NO: 137416 - protein, 10 aa, synthetic construct
THGRGDRSVV

SEQ ID NO: 137417 - protein, 10 aa, synthetic construct
THARGDRSVV

SEQ ID NO: 137418 - protein, 10 aa, synthetic construct
THVRGDRSVV

SEQ ID NO: 137419 - protein, 10 aa, synthetic construct
THPRGDRSVV

SEQ ID NO: 137420 - protein, 10 aa, synthetic construct
THLRGDRSVV

SEQ ID NO: 137421 - protein, 10 aa, synthetic construct
THIRGDRSVV

SEQ ID NO: 137422 - protein, 10 aa, synthetic construct
THMRGDRSVV

SEQ ID NO: 137423 - protein, 10 aa, synthetic construct
THWRGDRSVV

SEQ ID NO: 137424 - protein, 10 aa, synthetic construct
THFRGDRSVV

SEQ ID NO: 137425 - protein, 10 aa, synthetic construct
THKRGDRSVV

SEQ ID NO: 137426 - protein, 10 aa, synthetic construct
THRRGDRSVV

SEQ ID NO: 137427 - protein, 10 aa, synthetic construct
THHRGDRSVV

SEQ ID NO: 137428 - protein, 10 aa, synthetic construct
THSRGDRSVV

SEQ ID NO: 137429 - protein, 10 aa, synthetic construct
THTRGDRSVV

SEQ ID NO: 137430 - protein, 10 aa, synthetic construct
THYRGDRSVV

SEQ ID NO: 137431 - protein, 10 aa, synthetic construct
THNRGDRSVV

SEQ ID NO: 137432 - protein, 10 aa, synthetic construct
THQRGDRSVV

SEQ ID NO: 137433 - protein, 10 aa, synthetic construct
THDRGDRSVV

SEQ ID NO: 137434 - protein, 10 aa, synthetic construct
THERGDRSVV

SEQ ID NO: 137435 - protein, 10 aa, synthetic construct
TSGRGDRSVV

SEQ ID NO: 137436 - protein, 10 aa, synthetic construct
TSARGDRSVV

SEQ ID NO: 137437 - protein, 10 aa, synthetic construct
TSVRGDRSVV

SEQ ID NO: 137438 - protein, 10 aa, synthetic construct
TSPRGDRSVV

SEQ ID NO: 137439 - protein, 10 aa, synthetic construct
TSLRGDRSVV

SEQ ID NO: 137440 - protein, 10 aa, synthetic construct
TSIRGDRSVV

SEQ ID NO: 137441 - protein, 10 aa, synthetic construct
TSMRGDRSVV

SEQ ID NO: 137442 - protein, 10 aa, synthetic construct
TSWRGDRSVV

SEQ ID NO: 137443 - protein, 10 aa, synthetic construct
TSFRGDRSVV

SEQ ID NO: 137444 - protein, 10 aa, synthetic construct
TSKRGDRSVV

SEQ ID NO: 137445 - protein, 10 aa, synthetic construct
TSRRGDRSVV

SEQ ID NO: 137446 - protein, 10 aa, synthetic construct
TSHRGDRSVV

SEQ ID NO: 137447 - protein, 10 aa, synthetic construct
TSSRGDRSVV

SEQ ID NO: 137448 - protein, 10 aa, synthetic construct
TSTRGDRSVV

SEQ ID NO: 137449 - protein, 10 aa, synthetic construct
TSYRGDRSVV

SEQ ID NO: 137450 - protein, 10 aa, synthetic construct
TSNRGDRSVV

SEQ ID NO: 137451 - protein, 10 aa, synthetic construct
TSQRGDRSVV

SEQ ID NO: 137452 - protein, 10 aa, synthetic construct
TSDRGDRSVV

SEQ ID NO: 137453 - protein, 10 aa, synthetic construct
TSERGDRSVV

SEQ ID NO: 137454 - protein, 10 aa, synthetic construct
TTGRGDRSVV

SEQ ID NO: 137455 - protein, 10 aa, synthetic construct
TTARGDRSVV

SEQ ID NO: 137456 - protein, 10 aa, synthetic construct
TTVRGDRSVV

SEQ ID NO: 137457 - protein, 10 aa, synthetic construct
TTPRGDRSVV

SEQ ID NO: 137458 - protein, 10 aa, synthetic construct
TTLRGDRSVV

SEQ ID NO: 137459 - protein, 10 aa, synthetic construct
TTIRGDRSVV

SEQ ID NO: 137460 - protein, 10 aa, synthetic construct
TTMRGDRSVV

SEQ ID NO: 137461 - protein, 10 aa, synthetic construct
TTWRGDRSVV

SEQ ID NO: 137462 - protein, 10 aa, synthetic construct
TTFRGDRSVV

SEQ ID NO: 137463 - protein, 10 aa, synthetic construct
TTKRGDRSVV

SEQ ID NO: 137464 - protein, 10 aa, synthetic construct
TTRRGDRSVV

SEQ ID NO: 137465 - protein, 10 aa, synthetic construct
TTHRGDRSVV

SEQ ID NO: 137466 - protein, 10 aa, synthetic construct
TTSRGDRSVV

SEQ ID NO: 137467 - protein, 10 aa, synthetic construct
TTTRGDRSVV

SEQ ID NO: 137468 - protein, 10 aa, synthetic construct
TTYRGDRSVV

SEQ ID NO: 137469 - protein, 10 aa, synthetic construct
TTNRGDRSVV

SEQ ID NO: 137470 - protein, 10 aa, synthetic construct
TTQRGDRSVV

SEQ ID NO: 137471 - protein, 10 aa, synthetic construct
TTDRGDRSVV

SEQ ID NO: 137472 - protein, 10 aa, synthetic construct
TTERGDRSVV

SEQ ID NO: 137473 - protein, 10 aa, synthetic construct
TYGRGDRSVV

SEQ ID NO: 137474 - protein, 10 aa, synthetic construct
TYARGDRSVV

SEQ ID NO: 137475 - protein, 10 aa, synthetic construct
TYVRGDRSVV

SEQ ID NO: 137476 - protein, 10 aa, synthetic construct
TYPRGDRSVV

SEQ ID NO: 137477 - protein, 10 aa, synthetic construct
TYLRGDRSVV

SEQ ID NO: 137478 - protein, 10 aa, synthetic construct
TYIRGDRSVV

SEQ ID NO: 137479 - protein, 10 aa, synthetic construct
TYMRGDRSVV

SEQ ID NO: 137480 - protein, 10 aa, synthetic construct
TYWRGDRSVV

SEQ ID NO: 137481 - protein, 10 aa, synthetic construct
TYFRGDRSVV

SEQ ID NO: 137482 - protein, 10 aa, synthetic construct
TYKRGDRSVV

SEQ ID NO: 137483 - protein, 10 aa, synthetic construct
TYRRGDRSVV

SEQ ID NO: 137484 - protein, 10 aa, synthetic construct
TYHRGDRSVV

SEQ ID NO: 137485 - protein, 10 aa, synthetic construct
TYSRGDRSVV

SEQ ID NO: 137486 - protein, 10 aa, synthetic construct
TYTRGDRSVV

SEQ ID NO: 137487 - protein, 10 aa, synthetic construct
TYYRGDRSVV

SEQ ID NO: 137488 - protein, 10 aa, synthetic construct
TYNRGDRSVV

SEQ ID NO: 137489 - protein, 10 aa, synthetic construct
TYQRGDRSVV

SEQ ID NO: 137490 - protein, 10 aa, synthetic construct
TYDRGDRSVV

SEQ ID NO: 137491 - protein, 10 aa, synthetic construct
TYERGDRSVV

SEQ ID NO: 137492 - protein, 10 aa, synthetic construct
TNGRGDRSVV

SEQ ID NO: 137493 - protein, 10 aa, synthetic construct
TNARGDRSVV

SEQ ID NO: 137494 - protein, 10 aa, synthetic construct
TNVRGDRSVV

SEQ ID NO: 137495 - protein, 10 aa, synthetic construct
TNPRGDRSVV

SEQ ID NO: 137496 - protein, 10 aa, synthetic construct
TNLRGDRSVV

SEQ ID NO: 137497 - protein, 10 aa, synthetic construct
TNIRGDRSVV

SEQ ID NO: 137498 - protein, 10 aa, synthetic construct
TNMRGDRSVV

SEQ ID NO: 137499 - protein, 10 aa, synthetic construct
TNWRGDRSVV

SEQ ID NO: 137500 - protein, 10 aa, synthetic construct
TNFRGDRSVV

SEQ ID NO: 137501 - protein, 10 aa, synthetic construct
TNKRGDRSVV

SEQ ID NO: 137502 - protein, 10 aa, synthetic construct
TNRRGDRSVV

SEQ ID NO: 137503 - protein, 10 aa, synthetic construct
TNHRGDRSVV

SEQ ID NO: 137504 - protein, 10 aa, synthetic construct
TNSRGDRSVV

SEQ ID NO: 137505 - protein, 10 aa, synthetic construct
TNTRGDRSVV

SEQ ID NO: 137506 - protein, 10 aa, synthetic construct
TNYRGDRSVV

SEQ ID NO: 137507 - protein, 10 aa, synthetic construct
TNNRGDRSVV

SEQ ID NO: 137508 - protein, 10 aa, synthetic construct
TNQRGDRSVV

SEQ ID NO: 137509 - protein, 10 aa, synthetic construct
TNDRGDRSVV

SEQ ID NO: 137510 - protein, 10 aa, synthetic construct
TNERGDRSVV

SEQ ID NO: 137511 - protein, 10 aa, synthetic construct
TQGRGDRSVV

SEQ ID NO: 137512 - protein, 10 aa, synthetic construct
TQARGDRSVV

SEQ ID NO: 137513 - protein, 10 aa, synthetic construct
TQVRGDRSVV

SEQ ID NO: 137514 - protein, 10 aa, synthetic construct
TQPRGDRSVV

SEQ ID NO: 137515 - protein, 10 aa, synthetic construct
TQLRGDRSVV

SEQ ID NO: 137516 - protein, 10 aa, synthetic construct
TQIRGDRSVV

SEQ ID NO: 137517 - protein, 10 aa, synthetic construct
TQMRGDRSVV

SEQ ID NO: 137518 - protein, 10 aa, synthetic construct
TQWRGDRSVV

SEQ ID NO: 137519 - protein, 10 aa, synthetic construct
TQFRGDRSVV

SEQ ID NO: 137520 - protein, 10 aa, synthetic construct
TQKRGDRSVV

SEQ ID NO: 137521 - protein, 10 aa, synthetic construct
TQRRGDRSVV

SEQ ID NO: 137522 - protein, 10 aa, synthetic construct
TQHRGDRSVV

SEQ ID NO: 137523 - protein, 10 aa, synthetic construct
TQSRGDRSVV

SEQ ID NO: 137524 - protein, 10 aa, synthetic construct
TQTRGDRSVV

SEQ ID NO: 137525 - protein, 10 aa, synthetic construct
TQYRGDRSVV

SEQ ID NO: 137526 - protein, 10 aa, synthetic construct
TQNRGDRSVV

SEQ ID NO: 137527 - protein, 10 aa, synthetic construct
TQQRGDRSVV

SEQ ID NO: 137528 - protein, 10 aa, synthetic construct
TQDRGDRSVV

SEQ ID NO: 137529 - protein, 10 aa, synthetic construct
TQERGDRSVV

SEQ ID NO: 137530 - protein, 10 aa, synthetic construct
TDGRGDRSVV

SEQ ID NO: 137531 - protein, 10 aa, synthetic construct
TDARGDRSVV

SEQ ID NO: 137532 - protein, 10 aa, synthetic construct
TDVRGDRSVV

SEQ ID NO: 137533 - protein, 10 aa, synthetic construct
TDPRGDRSVV

SEQ ID NO: 137534 - protein, 10 aa, synthetic construct
TDLRGDRSVV

SEQ ID NO: 137535 - protein, 10 aa, synthetic construct
TDIRGDRSVV

SEQ ID NO: 137536 - protein, 10 aa, synthetic construct
TDMRGDRSVV

SEQ ID NO: 137537 - protein, 10 aa, synthetic construct
TDWRGDRSVV

SEQ ID NO: 137538 - protein, 10 aa, synthetic construct
TDFRGDRSVV

SEQ ID NO: 137539 - protein, 10 aa, synthetic construct
TDKRGDRSVV

SEQ ID NO: 137540 - protein, 10 aa, synthetic construct
TDRRGDRSVV

SEQ ID NO: 137541 - protein, 10 aa, synthetic construct
TDHRGDRSVV

SEQ ID NO: 137542 - protein, 10 aa, synthetic construct
TDSRGDRSVV

SEQ ID NO: 137543 - protein, 10 aa, synthetic construct
TDTRGDRSVV

SEQ ID NO: 137544 - protein, 10 aa, synthetic construct
TDYRGDRSVV

SEQ ID NO: 137545 - protein, 10 aa, synthetic construct
TDNRGDRSVV

SEQ ID NO: 137546 - protein, 10 aa, synthetic construct
TDQRGDRSVV

SEQ ID NO: 137547 - protein, 10 aa, synthetic construct
TDDRGDRSVV

SEQ ID NO: 137548 - protein, 10 aa, synthetic construct
TDERGDRSVV

SEQ ID NO: 137549 - protein, 10 aa, synthetic construct
TEGRGDRSVV

SEQ ID NO: 137550 - protein, 10 aa, synthetic construct
TEARGDRSVV

SEQ ID NO: 137551 - protein, 10 aa, synthetic construct
TEVRGDRSVV

SEQ ID NO: 137552 - protein, 10 aa, synthetic construct
TEPRGDRSVV

SEQ ID NO: 137553 - protein, 10 aa, synthetic construct
TELRGDRSVV

SEQ ID NO: 137554 - protein, 10 aa, synthetic construct
TEIRGDRSVV

SEQ ID NO: 137555 - protein, 10 aa, synthetic construct
TEMRGDRSVV

SEQ ID NO: 137556 - protein, 10 aa, synthetic construct
TEWRGDRSVV

SEQ ID NO: 137557 - protein, 10 aa, synthetic construct
TEFRGDRSVV

SEQ ID NO: 137558 - protein, 10 aa, synthetic construct
TEKRGDRSVV

SEQ ID NO: 137559 - protein, 10 aa, synthetic construct
TERRGDRSVV

SEQ ID NO: 137560 - protein, 10 aa, synthetic construct
TEHRGDRSVV

SEQ ID NO: 137561 - protein, 10 aa, synthetic construct
TESRGDRSVV

SEQ ID NO: 137562 - protein, 10 aa, synthetic construct
TETRGDRSVV

SEQ ID NO: 137563 - protein, 10 aa, synthetic construct
TEYRGDRSVV

SEQ ID NO: 137564 - protein, 10 aa, synthetic construct
TENRGDRSVV

SEQ ID NO: 137565 - protein, 10 aa, synthetic construct
TEQRGDRSVV

SEQ ID NO: 137566 - protein, 10 aa, synthetic construct
TEDRGDRSVV

SEQ ID NO: 137567 - protein, 10 aa, synthetic construct
TEERGDRSVV

SEQ ID NO: 137568 - protein, 10 aa, synthetic construct
AGGRGDRSVV

SEQ ID NO: 137569 - protein, 10 aa, synthetic construct
AGARGDRSVV

SEQ ID NO: 137570 - protein, 10 aa, synthetic construct
AGVRGDRSVV

SEQ ID NO: 137571 - protein, 10 aa, synthetic construct
AGPRGDRSVV

SEQ ID NO: 137572 - protein, 10 aa, synthetic construct
AGLRGDRSVV

SEQ ID NO: 137573 - protein, 10 aa, synthetic construct
AGIRGDRSVV

SEQ ID NO: 137574 - protein, 10 aa, synthetic construct
AGMRGDRSVV

SEQ ID NO: 137575 - protein, 10 aa, synthetic construct
AGWRGDRSVV

SEQ ID NO: 137576 - protein, 10 aa, synthetic construct
AGFRGDRSVV

SEQ ID NO: 137577 - protein, 10 aa, synthetic construct
AGKRGDRSVV

SEQ ID NO: 137578 - protein, 10 aa, synthetic construct
AGRRGDRSVV

SEQ ID NO: 137579 - protein, 10 aa, synthetic construct
AGHRGDRSVV

SEQ ID NO: 137580 - protein, 10 aa, synthetic construct
AGSRGDRSVV

SEQ ID NO: 137581 - protein, 10 aa, synthetic construct
AGTRGDRSVV

SEQ ID NO: 137582 - protein, 10 aa, synthetic construct
AGYRGDRSVV

SEQ ID NO: 137583 - protein, 10 aa, synthetic construct
AGNRGDRSVV

SEQ ID NO: 137584 - protein, 10 aa, synthetic construct
AGQRGDRSVV

SEQ ID NO: 137585 - protein, 10 aa, synthetic construct
AGDRGDRSVV

SEQ ID NO: 137586 - protein, 10 aa, synthetic construct
AGERGDRSVV

SEQ ID NO: 137587 - protein, 10 aa, synthetic construct
AAGRGDRSVV

SEQ ID NO: 137588 - protein, 10 aa, synthetic construct
AAARGDRSVV

SEQ ID NO: 137589 - protein, 10 aa, synthetic construct
AAVRGDRSVV

SEQ ID NO: 137590 - protein, 10 aa, synthetic construct
AAPRGDRSVV

SEQ ID NO: 137591 - protein, 10 aa, synthetic construct
AALRGDRSVV

SEQ ID NO: 137592 - protein, 10 aa, synthetic construct
AAIRGDRSVV

SEQ ID NO: 137593 - protein, 10 aa, synthetic construct
AAMRGDRSVV

SEQ ID NO: 137594 - protein, 10 aa, synthetic construct
AAWRGDRSVV

SEQ ID NO: 137595 - protein, 10 aa, synthetic construct
AAFRGDRSVV

SEQ ID NO: 137596 - protein, 10 aa, synthetic construct
AAKRGDRSVV

SEQ ID NO: 137597 - protein, 10 aa, synthetic construct
AARRGDRSVV

SEQ ID NO: 137598 - protein, 10 aa, synthetic construct
AAHRGDRSVV

SEQ ID NO: 137599 - protein, 10 aa, synthetic construct
AASRGDRSVV

SEQ ID NO: 137600 - protein, 10 aa, synthetic construct
AATRGDRSVV

SEQ ID NO: 137601 - protein, 10 aa, synthetic construct
AAYRGDRSVV

SEQ ID NO: 137602 - protein, 10 aa, synthetic construct
AANRGDRSVV

SEQ ID NO: 137603 - protein, 10 aa, synthetic construct
AAQRGDRSVV

SEQ ID NO: 137604 - protein, 10 aa, synthetic construct
AADRGDRSVV

SEQ ID NO: 137605 - protein, 10 aa, synthetic construct
AAERGDRSVV

SEQ ID NO: 137606 - protein, 10 aa, synthetic construct
AVGRGDRSVV

SEQ ID NO: 137607 - protein, 10 aa, synthetic construct
AVARGDRSVV

SEQ ID NO: 137608 - protein, 10 aa, synthetic construct
AVVRGDRSVV

SEQ ID NO: 137609 - protein, 10 aa, synthetic construct
AVPRGDRSVV

SEQ ID NO: 137610 - protein, 10 aa, synthetic construct
AVLRGDRSVV

SEQ ID NO: 137611 - protein, 10 aa, synthetic construct
AVIRGDRSVV

SEQ ID NO: 137612 - protein, 10 aa, synthetic construct
AVMRGDRSVV

SEQ ID NO: 137613 - protein, 10 aa, synthetic construct
AVWRGDRSVV

SEQ ID NO: 137614 - protein, 10 aa, synthetic construct
AVFRGDRSVV

SEQ ID NO: 137615 - protein, 10 aa, synthetic construct
AVKRGDRSVV

SEQ ID NO: 137616 - protein, 10 aa, synthetic construct
AVRRGDRSVV

SEQ ID NO: 137617 - protein, 10 aa, synthetic construct
AVHRGDRSVV

SEQ ID NO: 137618 - protein, 10 aa, synthetic construct
AVSRGDRSVV

SEQ ID NO: 137619 - protein, 10 aa, synthetic construct
AVTRGDRSVV

SEQ ID NO: 137620 - protein, 10 aa, synthetic construct
AVYRGDRSVV

SEQ ID NO: 137621 - protein, 10 aa, synthetic construct
AVNRGDRSVV

SEQ ID NO: 137622 - protein, 10 aa, synthetic construct
AVQRGDRSVV

SEQ ID NO: 137623 - protein, 10 aa, synthetic construct
AVDRGDRSVV

SEQ ID NO: 137624 - protein, 10 aa, synthetic construct
AVERGDRSVV

SEQ ID NO: 137625 - protein, 10 aa, synthetic construct
APGRGDRSVV

SEQ ID NO: 137626 - protein, 10 aa, synthetic construct
APARGDRSVV

SEQ ID NO: 137627 - protein, 10 aa, synthetic construct
APVRGDRSVV

SEQ ID NO: 137628 - protein, 10 aa, synthetic construct
APPRGDRSVV

SEQ ID NO: 137629 - protein, 10 aa, synthetic construct
APLRGDRSVV

SEQ ID NO: 137630 - protein, 10 aa, synthetic construct
APIRGDRSVV

SEQ ID NO: 137631 - protein, 10 aa, synthetic construct
APMRGDRSVV

SEQ ID NO: 137632 - protein, 10 aa, synthetic construct
APWRGDRSVV

SEQ ID NO: 137633 - protein, 10 aa, synthetic construct
APFRGDRSVV

SEQ ID NO: 137634 - protein, 10 aa, synthetic construct
APKRGDRSVV

SEQ ID NO: 137635 - protein, 10 aa, synthetic construct
APRRGDRSVV

SEQ ID NO: 137636 - protein, 10 aa, synthetic construct
APHRGDRSVV

SEQ ID NO: 137637 - protein, 10 aa, synthetic construct
APSRGDRSVV

SEQ ID NO: 137638 - protein, 10 aa, synthetic construct
APTRGDRSVV

SEQ ID NO: 137639 - protein, 10 aa, synthetic construct
APYRGDRSVV

SEQ ID NO: 137640 - protein, 10 aa, synthetic construct
APNRGDRSVV

SEQ ID NO: 137641 - protein, 10 aa, synthetic construct
APQRGDRSVV

SEQ ID NO: 137642 - protein, 10 aa, synthetic construct
APDRGDRSVV

SEQ ID NO: 137643 - protein, 10 aa, synthetic construct
APERGDRSVV

SEQ ID NO: 137644 - protein, 10 aa, synthetic construct
ALGRGDRSVV

SEQ ID NO: 137645 - protein, 10 aa, synthetic construct
ALARGDRSVV

SEQ ID NO: 137646 - protein, 10 aa, synthetic construct
ALVRGDRSVV

SEQ ID NO: 137647 - protein, 10 aa, synthetic construct
ALPRGDRSVV

SEQ ID NO: 137648 - protein, 10 aa, synthetic construct
ALLRGDRSVV

SEQ ID NO: 137649 - protein, 10 aa, synthetic construct
ALIRGDRSVV

SEQ ID NO: 137650 - protein, 10 aa, synthetic construct
ALMRGDRSVV

SEQ ID NO: 137651 - protein, 10 aa, synthetic construct
ALWRGDRSVV

SEQ ID NO: 137652 - protein, 10 aa, synthetic construct
ALFRGDRSVV

SEQ ID NO: 137653 - protein, 10 aa, synthetic construct
ALKRGDRSVV

SEQ ID NO: 137654 - protein, 10 aa, synthetic construct
ALRRGDRSVV

SEQ ID NO: 137655 - protein, 10 aa, synthetic construct
ALHRGDRSVV

SEQ ID NO: 137656 - protein, 10 aa, synthetic construct
ALSRGDRSVV

SEQ ID NO: 137657 - protein, 10 aa, synthetic construct
ALTRGDRSVV

SEQ ID NO: 137658 - protein, 10 aa, synthetic construct
ALYRGDRSVV

SEQ ID NO: 137659 - protein, 10 aa, synthetic construct
ALNRGDRSVV

SEQ ID NO: 137660 - protein, 10 aa, synthetic construct
ALQRGDRSVV

SEQ ID NO: 137661 - protein, 10 aa, synthetic construct
ALDRGDRSVV

SEQ ID NO: 137662 - protein, 10 aa, synthetic construct
ALERGDRSVV

SEQ ID NO: 137663 - protein, 10 aa, synthetic construct
AIGRGDRSVV

SEQ ID NO: 137664 - protein, 10 aa, synthetic construct
AIARGDRSVV

SEQ ID NO: 137665 - protein, 10 aa, synthetic construct
AIVRGDRSVV

SEQ ID NO: 137666 - protein, 10 aa, synthetic construct
AIPRGDRSVV

SEQ ID NO: 137667 - protein, 10 aa, synthetic construct
AILRGDRSVV

SEQ ID NO: 137668 - protein, 10 aa, synthetic construct
AIIRGDRSVV

SEQ ID NO: 137669 - protein, 10 aa, synthetic construct
AIMRGDRSVV

SEQ ID NO: 137670 - protein, 10 aa, synthetic construct
AIWRGDRSVV

SEQ ID NO: 137671 - protein, 10 aa, synthetic construct
AIFRGDRSVV

SEQ ID NO: 137672 - protein, 10 aa, synthetic construct
AIKRGDRSVV

SEQ ID NO: 137673 - protein, 10 aa, synthetic construct
AIRRGDRSVV

SEQ ID NO: 137674 - protein, 10 aa, synthetic construct
AIHRGDRSVV

SEQ ID NO: 137675 - protein, 10 aa, synthetic construct
AISRGDRSVV

SEQ ID NO: 137676 - protein, 10 aa, synthetic construct
AITRGDRSVV

SEQ ID NO: 137677 - protein, 10 aa, synthetic construct
AIYRGDRSVV

SEQ ID NO: 137678 - protein, 10 aa, synthetic construct
AINRGDRSVV

SEQ ID NO: 137679 - protein, 10 aa, synthetic construct
AIQRGDRSVV

SEQ ID NO: 137680 - protein, 10 aa, synthetic construct
AIDRGDRSVV

SEQ ID NO: 137681 - protein, 10 aa, synthetic construct
AIERGDRSVV

SEQ ID NO: 137682 - protein, 10 aa, synthetic construct
AMGRGDRSVV

SEQ ID NO: 137683 - protein, 10 aa, synthetic construct
AMARGDRSVV

SEQ ID NO: 137684 - protein, 10 aa, synthetic construct
AMVRGDRSVV

SEQ ID NO: 137685 - protein, 10 aa, synthetic construct
AMPRGDRSVV

SEQ ID NO: 137686 - protein, 10 aa, synthetic construct
AMLRGDRSVV

SEQ ID NO: 137687 - protein, 10 aa, synthetic construct
AMIRGDRSVV

SEQ ID NO: 137688 - protein, 10 aa, synthetic construct
AMMRGDRSVV

SEQ ID NO: 137689 - protein, 10 aa, synthetic construct
AMWRGDRSVV

SEQ ID NO: 137690 - protein, 10 aa, synthetic construct
AMFRGDRSVV

SEQ ID NO: 137691 - protein, 10 aa, synthetic construct
AMKRGDRSVV

SEQ ID NO: 137692 - protein, 10 aa, synthetic construct
AMRRGDRSVV

SEQ ID NO: 137693 - protein, 10 aa, synthetic construct
AMHRGDRSVV

SEQ ID NO: 137694 - protein, 10 aa, synthetic construct
AMSRGDRSVV

SEQ ID NO: 137695 - protein, 10 aa, synthetic construct
AMTRGDRSVV

SEQ ID NO: 137696 - protein, 10 aa, synthetic construct
AMYRGDRSVV

SEQ ID NO: 137697 - protein, 10 aa, synthetic construct
AMNRGDRSVV

SEQ ID NO: 137698 - protein, 10 aa, synthetic construct
AMQRGDRSVV

SEQ ID NO: 137699 - protein, 10 aa, synthetic construct
AMDRGDRSVV

SEQ ID NO: 137700 - protein, 10 aa, synthetic construct
AMERGDRSVV

SEQ ID NO: 137701 - protein, 10 aa, synthetic construct
AWGRGDRSVV

SEQ ID NO: 137702 - protein, 10 aa, synthetic construct
AWARGDRSVV

SEQ ID NO: 137703 - protein, 10 aa, synthetic construct
AWVRGDRSVV

SEQ ID NO: 137704 - protein, 10 aa, synthetic construct
AWPRGDRSVV

SEQ ID NO: 137705 - protein, 10 aa, synthetic construct
AWLRGDRSVV

SEQ ID NO: 137706 - protein, 10 aa, synthetic construct
AWIRGDRSVV

SEQ ID NO: 137707 - protein, 10 aa, synthetic construct
AWMRGDRSVV

SEQ ID NO: 137708 - protein, 10 aa, synthetic construct
AWWRGDRSVV

SEQ ID NO: 137709 - protein, 10 aa, synthetic construct
AWFRGDRSVV

SEQ ID NO: 137710 - protein, 10 aa, synthetic construct
AWKRGDRSVV

SEQ ID NO: 137711 - protein, 10 aa, synthetic construct
AWRRGDRSVV

SEQ ID NO: 137712 - protein, 10 aa, synthetic construct
AWHRGDRSVV

SEQ ID NO: 137713 - protein, 10 aa, synthetic construct
AWSRGDRSVV

SEQ ID NO: 137714 - protein, 10 aa, synthetic construct
AWTRGDRSVV

SEQ ID NO: 137715 - protein, 10 aa, synthetic construct
AWYRGDRSVV

SEQ ID NO: 137716 - protein, 10 aa, synthetic construct
AWNRGDRSVV

SEQ ID NO: 137717 - protein, 10 aa, synthetic construct
AWQRGDRSVV

SEQ ID NO: 137718 - protein, 10 aa, synthetic construct
AWDRGDRSVV

SEQ ID NO: 137719 - protein, 10 aa, synthetic construct
AWERGDRSVV

SEQ ID NO: 137720 - protein, 10 aa, synthetic construct
AFGRGDRSVV

SEQ ID NO: 137721 - protein, 10 aa, synthetic construct
AFARGDRSVV

SEQ ID NO: 137722 - protein, 10 aa, synthetic construct
AFVRGDRSVV

SEQ ID NO: 137723 - protein, 10 aa, synthetic construct
AFPRGDRSVV

SEQ ID NO: 137724 - protein, 10 aa, synthetic construct
AFLRGDRSVV

SEQ ID NO: 137725 - protein, 10 aa, synthetic construct
AFIRGDRSVV

SEQ ID NO: 137726 - protein, 10 aa, synthetic construct
AFMRGDRSVV

SEQ ID NO: 137727 - protein, 10 aa, synthetic construct
AFWRGDRSVV

SEQ ID NO: 137728 - protein, 10 aa, synthetic construct
AFFRGDRSVV

SEQ ID NO: 137729 - protein, 10 aa, synthetic construct
AFKRGDRSVV

SEQ ID NO: 137730 - protein, 10 aa, synthetic construct
AFRRGDRSVV

SEQ ID NO: 137731 - protein, 10 aa, synthetic construct
AFHRGDRSVV

SEQ ID NO: 137732 - protein, 10 aa, synthetic construct
AFSRGDRSVV

SEQ ID NO: 137733 - protein, 10 aa, synthetic construct
AFTRGDRSVV

SEQ ID NO: 137734 - protein, 10 aa, synthetic construct
AFYRGDRSVV

SEQ ID NO: 137735 - protein, 10 aa, synthetic construct
AFNRGDRSVV

SEQ ID NO: 137736 - protein, 10 aa, synthetic construct
AFQRGDRSVV

SEQ ID NO: 137737 - protein, 10 aa, synthetic construct
AFDRGDRSVV

SEQ ID NO: 137738 - protein, 10 aa, synthetic construct
AFERGDRSVV

SEQ ID NO: 137739 - protein, 10 aa, synthetic construct
AKGRGDRSVV

SEQ ID NO: 137740 - protein, 10 aa, synthetic construct
AKARGDRSVV

SEQ ID NO: 137741 - protein, 10 aa, synthetic construct
AKVRGDRSVV

SEQ ID NO: 137742 - protein, 10 aa, synthetic construct
AKPRGDRSVV

SEQ ID NO: 137743 - protein, 10 aa, synthetic construct
AKLRGDRSVV

SEQ ID NO: 137744 - protein, 10 aa, synthetic construct
AKIRGDRSVV

SEQ ID NO: 137745 - protein, 10 aa, synthetic construct
AKMRGDRSVV

SEQ ID NO: 137746 - protein, 10 aa, synthetic construct
AKWRGDRSVV

SEQ ID NO: 137747 - protein, 10 aa, synthetic construct
AKFRGDRSVV

SEQ ID NO: 137748 - protein, 10 aa, synthetic construct
AKKRGDRSVV

SEQ ID NO: 137749 - protein, 10 aa, synthetic construct
AKRRGDRSVV

SEQ ID NO: 137750 - protein, 10 aa, synthetic construct
AKHRGDRSVV

SEQ ID NO: 137751 - protein, 10 aa, synthetic construct
AKSRGDRSVV

SEQ ID NO: 137752 - protein, 10 aa, synthetic construct
AKTRGDRSVV

SEQ ID NO: 137753 - protein, 10 aa, synthetic construct
AKYRGDRSVV

SEQ ID NO: 137754 - protein, 10 aa, synthetic construct
AKNRGDRSVV

SEQ ID NO: 137755 - protein, 10 aa, synthetic construct
AKQRGDRSVV

SEQ ID NO: 137756 - protein, 10 aa, synthetic construct
AKDRGDRSVV

SEQ ID NO: 137757 - protein, 10 aa, synthetic construct
AKERGDRSVV

SEQ ID NO: 137758 - protein, 10 aa, synthetic construct
ARGRGDRSVV

SEQ ID NO: 137759 - protein, 10 aa, synthetic construct
ARARGDRSVV

SEQ ID NO: 137760 - protein, 10 aa, synthetic construct
ARVRGDRSVV

SEQ ID NO: 137761 - protein, 10 aa, synthetic construct
ARPRGDRSVV

SEQ ID NO: 137762 - protein, 10 aa, synthetic construct
ARLRGDRSVV

SEQ ID NO: 137763 - protein, 10 aa, synthetic construct
ARIRGDRSVV

SEQ ID NO: 137764 - protein, 10 aa, synthetic construct
ARMRGDRSVV

SEQ ID NO: 137765 - protein, 10 aa, synthetic construct
ARWRGDRSVV

SEQ ID NO: 137766 - protein, 10 aa, synthetic construct
ARFRGDRSVV

SEQ ID NO: 137767 - protein, 10 aa, synthetic construct
ARKRGDRSVV

SEQ ID NO: 137768 - protein, 10 aa, synthetic construct
ARRRGDRSVV

SEQ ID NO: 137769 - protein, 10 aa, synthetic construct
ARHRGDRSVV

SEQ ID NO: 137770 - protein, 10 aa, synthetic construct
ARSRGDRSVV

SEQ ID NO: 137771 - protein, 10 aa, synthetic construct
ARTRGDRSVV

SEQ ID NO: 137772 - protein, 10 aa, synthetic construct
ARYRGDRSVV

SEQ ID NO: 137773 - protein, 10 aa, synthetic construct
ARNRGDRSVV

SEQ ID NO: 137774 - protein, 10 aa, synthetic construct
ARQRGDRSVV

SEQ ID NO: 137775 - protein, 10 aa, synthetic construct
ARDRGDRSVV

SEQ ID NO: 137776 - protein, 10 aa, synthetic construct
ARERGDRSVV

SEQ ID NO: 137777 - protein, 10 aa, synthetic construct
AHGRGDRSVV

SEQ ID NO: 137778 - protein, 10 aa, synthetic construct
AHARGDRSVV

SEQ ID NO: 137779 - protein, 10 aa, synthetic construct
AHVRGDRSVV

SEQ ID NO: 137780 - protein, 10 aa, synthetic construct
AHPRGDRSVV

SEQ ID NO: 137781 - protein, 10 aa, synthetic construct
AHLRGDRSVV

SEQ ID NO: 137782 - protein, 10 aa, synthetic construct
AHIRGDRSVV

SEQ ID NO: 137783 - protein, 10 aa, synthetic construct
AHMRGDRSVV

SEQ ID NO: 137784 - protein, 10 aa, synthetic construct
AHWRGDRSVV

SEQ ID NO: 137785 - protein, 10 aa, synthetic construct
AHFRGDRSVV

SEQ ID NO: 137786 - protein, 10 aa, synthetic construct
AHKRGDRSVV

SEQ ID NO: 137787 - protein, 10 aa, synthetic construct
AHRRGDRSVV

SEQ ID NO: 137788 - protein, 10 aa, synthetic construct
AHHRGDRSVV

SEQ ID NO: 137789 - protein, 10 aa, synthetic construct
AHSRGDRSVV

SEQ ID NO: 137790 - protein, 10 aa, synthetic construct
AHTRGDRSVV

SEQ ID NO: 137791 - protein, 10 aa, synthetic construct
AHYRGDRSVV

SEQ ID NO: 137792 - protein, 10 aa, synthetic construct
AHNRGDRSVV

SEQ ID NO: 137793 - protein, 10 aa, synthetic construct
AHQRGDRSVV

SEQ ID NO: 137794 - protein, 10 aa, synthetic construct
AHDRGDRSVV

SEQ ID NO: 137795 - protein, 10 aa, synthetic construct
AHERGDRSVV

SEQ ID NO: 137796 - protein, 10 aa, synthetic construct
ASGRGDRSVV

SEQ ID NO: 137797 - protein, 10 aa, synthetic construct
ASARGDRSVV

SEQ ID NO: 137798 - protein, 10 aa, synthetic construct
ASVRGDRSVV

SEQ ID NO: 137799 - protein, 10 aa, synthetic construct
ASPRGDRSVV

SEQ ID NO: 137800 - protein, 10 aa, synthetic construct
ASLRGDRSVV

SEQ ID NO: 137801 - protein, 10 aa, synthetic construct
ASIRGDRSVV

SEQ ID NO: 137802 - protein, 10 aa, synthetic construct
ASMRGDRSVV

SEQ ID NO: 137803 - protein, 10 aa, synthetic construct
ASWRGDRSVV

SEQ ID NO: 137804 - protein, 10 aa, synthetic construct
ASFRGDRSVV

SEQ ID NO: 137805 - protein, 10 aa, synthetic construct
ASKRGDRSVV

SEQ ID NO: 137806 - protein, 10 aa, synthetic construct
ASRRGDRSVV

SEQ ID NO: 137807 - protein, 10 aa, synthetic construct
ASHRGDRSVV

SEQ ID NO: 137808 - protein, 10 aa, synthetic construct
ASSRGDRSVV

SEQ ID NO: 137809 - protein, 10 aa, synthetic construct
ASTRGDRSVV

SEQ ID NO: 137810 - protein, 10 aa, synthetic construct
ASYRGDRSVV

SEQ ID NO: 137811 - protein, 10 aa, synthetic construct
ASNRGDRSVV

SEQ ID NO: 137812 - protein, 10 aa, synthetic construct
ASQRGDRSVV

SEQ ID NO: 137813 - protein, 10 aa, synthetic construct
ASDRGDRSVV

SEQ ID NO: 137814 - protein, 10 aa, synthetic construct
ASERGDRSVV

SEQ ID NO: 137815 - protein, 10 aa, synthetic construct
ATGRGDRSVV

SEQ ID NO: 137816 - protein, 10 aa, synthetic construct
ATARGDRSVV

SEQ ID NO: 137817 - protein, 10 aa, synthetic construct
ATVRGDRSVV

SEQ ID NO: 137818 - protein, 10 aa, synthetic construct
ATPRGDRSVV

SEQ ID NO: 137819 - protein, 10 aa, synthetic construct
ATLRGDRSVV

SEQ ID NO: 137820 - protein, 10 aa, synthetic construct
ATIRGDRSVV

SEQ ID NO: 137821 - protein, 10 aa, synthetic construct
ATMRGDRSVV

SEQ ID NO: 137822 - protein, 10 aa, synthetic construct
ATWRGDRSVV

SEQ ID NO: 137823 - protein, 10 aa, synthetic construct
ATFRGDRSVV

SEQ ID NO: 137824 - protein, 10 aa, synthetic construct
ATKRGDRSVV

SEQ ID NO: 137825 - protein, 10 aa, synthetic construct
ATRRGDRSVV

SEQ ID NO: 137826 - protein, 10 aa, synthetic construct
ATHRGDRSVV

SEQ ID NO: 137827 - protein, 10 aa, synthetic construct
ATSRGDRSVV

SEQ ID NO: 137828 - protein, 10 aa, synthetic construct
ATTRGDRSVV

SEQ ID NO: 137829 - protein, 10 aa, synthetic construct
ATYRGDRSVV

SEQ ID NO: 137830 - protein, 10 aa, synthetic construct
ATNRGDRSVV

SEQ ID NO: 137831 - protein, 10 aa, synthetic construct
ATQRGDRSVV

SEQ ID NO: 137832 - protein, 10 aa, synthetic construct
ATDRGDRSVV

SEQ ID NO: 137833 - protein, 10 aa, synthetic construct
ATERGDRSVV

SEQ ID NO: 137834 - protein, 10 aa, synthetic construct
AYGRGDRSVV

SEQ ID NO: 137835 - protein, 10 aa, synthetic construct
AYARGDRSVV

SEQ ID NO: 137836 - protein, 10 aa, synthetic construct
AYVRGDRSVV

SEQ ID NO: 137837 - protein, 10 aa, synthetic construct
AYPRGDRSVV

SEQ ID NO: 137838 - protein, 10 aa, synthetic construct
AYLRGDRSVV

SEQ ID NO: 137839 - protein, 10 aa, synthetic construct
AYIRGDRSVV

SEQ ID NO: 137840 - protein, 10 aa, synthetic construct
AYMRGDRSVV

SEQ ID NO: 137841 - protein, 10 aa, synthetic construct
AYWRGDRSVV

SEQ ID NO: 137842 - protein, 10 aa, synthetic construct
AYFRGDRSVV

SEQ ID NO: 137843 - protein, 10 aa, synthetic construct
AYKRGDRSVV

SEQ ID NO: 137844 - protein, 10 aa, synthetic construct
AYRRGDRSVV

SEQ ID NO: 137845 - protein, 10 aa, synthetic construct
AYHRGDRSVV

SEQ ID NO: 137846 - protein, 10 aa, synthetic construct
AYSRGDRSVV

SEQ ID NO: 137847 - protein, 10 aa, synthetic construct
AYTRGDRSVV

SEQ ID NO: 137848 - protein, 10 aa, synthetic construct
AYYRGDRSVV

SEQ ID NO: 137849 - protein, 10 aa, synthetic construct
AYNRGDRSVV

SEQ ID NO: 137850 - protein, 10 aa, synthetic construct
AYQRGDRSVV

SEQ ID NO: 137851 - protein, 10 aa, synthetic construct
AYDRGDRSVV

SEQ ID NO: 137852 - protein, 10 aa, synthetic construct
AYERGDRSVV

SEQ ID NO: 137853 - protein, 10 aa, synthetic construct
ANGRGDRSVV

SEQ ID NO: 137854 - protein, 10 aa, synthetic construct
ANARGDRSVV

SEQ ID NO: 137855 - protein, 10 aa, synthetic construct
ANVRGDRSVV

SEQ ID NO: 137856 - protein, 10 aa, synthetic construct
ANPRGDRSVV

SEQ ID NO: 137857 - protein, 10 aa, synthetic construct
ANLRGDRSVV

SEQ ID NO: 137858 - protein, 10 aa, synthetic construct
ANIRGDRSVV

SEQ ID NO: 137859 - protein, 10 aa, synthetic construct
ANMRGDRSVV

SEQ ID NO: 137860 - protein, 10 aa, synthetic construct
ANWRGDRSVV

SEQ ID NO: 137861 - protein, 10 aa, synthetic construct
ANFRGDRSVV

SEQ ID NO: 137862 - protein, 10 aa, synthetic construct
ANKRGDRSVV

SEQ ID NO: 137863 - protein, 10 aa, synthetic construct
ANRRGDRSVV

SEQ ID NO: 137864 - protein, 10 aa, synthetic construct
ANHRGDRSVV

SEQ ID NO: 137865 - protein, 10 aa, synthetic construct
ANSRGDRSVV

SEQ ID NO: 137866 - protein, 10 aa, synthetic construct
ANTRGDRSVV

SEQ ID NO: 137867 - protein, 10 aa, synthetic construct
ANYRGDRSVV

SEQ ID NO: 137868 - protein, 10 aa, synthetic construct
ANNRGDRSVV

SEQ ID NO: 137869 - protein, 10 aa, synthetic construct
ANQRGDRSVV

SEQ ID NO: 137870 - protein, 10 aa, synthetic construct
ANDRGDRSVV

SEQ ID NO: 137871 - protein, 10 aa, synthetic construct
ANERGDRSVV

SEQ ID NO: 137872 - protein, 10 aa, synthetic construct
AQGRGDRSVV

SEQ ID NO: 137873 - protein, 10 aa, synthetic construct
AQARGDRSVV

SEQ ID NO: 137874 - protein, 10 aa, synthetic construct
AQVRGDRSVV

SEQ ID NO: 137875 - protein, 10 aa, synthetic construct
AQPRGDRSVV

SEQ ID NO: 137876 - protein, 10 aa, synthetic construct
AQLRGDRSVV

SEQ ID NO: 137877 - protein, 10 aa, synthetic construct
AQIRGDRSVV

SEQ ID NO: 137878 - protein, 10 aa, synthetic construct
AQMRGDRSVV

SEQ ID NO: 137879 - protein, 10 aa, synthetic construct
AQWRGDRSVV

SEQ ID NO: 137880 - protein, 10 aa, synthetic construct
AQFRGDRSVV

SEQ ID NO: 137881 - protein, 10 aa, synthetic construct
AQKRGDRSVV

SEQ ID NO: 137882 - protein, 10 aa, synthetic construct
AQRRGDRSVV

SEQ ID NO: 137883 - protein, 10 aa, synthetic construct
AQHRGDRSVV

SEQ ID NO: 137884 - protein, 10 aa, synthetic construct
AQSRGDRSVV

SEQ ID NO: 137885 - protein, 10 aa, synthetic construct
AQTRGDRSVV

SEQ ID NO: 137886 - protein, 10 aa, synthetic construct
AQYRGDRSVV

SEQ ID NO: 137887 - protein, 10 aa, synthetic construct
AQNRGDRSVV

SEQ ID NO: 137888 - protein, 10 aa, synthetic construct
AQQRGDRSVV

SEQ ID NO: 137889 - protein, 10 aa, synthetic construct
AQDRGDRSVV

SEQ ID NO: 137890 - protein, 10 aa, synthetic construct
AQERGDRSVV

SEQ ID NO: 137891 - protein, 10 aa, synthetic construct
ADGRGDRSVV

SEQ ID NO: 137892 - protein, 10 aa, synthetic construct
ADARGDRSVV

SEQ ID NO: 137893 - protein, 10 aa, synthetic construct
ADVRGDRSVV

SEQ ID NO: 137894 - protein, 10 aa, synthetic construct
ADPRGDRSVV

SEQ ID NO: 137895 - protein, 10 aa, synthetic construct
ADLRGDRSVV

SEQ ID NO: 137896 - protein, 10 aa, synthetic construct
ADIRGDRSVV

SEQ ID NO: 137897 - protein, 10 aa, synthetic construct
ADMRGDRSVV

SEQ ID NO: 137898 - protein, 10 aa, synthetic construct
ADWRGDRSVV

SEQ ID NO: 137899 - protein, 10 aa, synthetic construct
ADFRGDRSVV

SEQ ID NO: 137900 - protein, 10 aa, synthetic construct
ADKRGDRSVV

SEQ ID NO: 137901 - protein, 10 aa, synthetic construct
ADRRGDRSVV

SEQ ID NO: 137902 - protein, 10 aa, synthetic construct
ADHRGDRSVV

SEQ ID NO: 137903 - protein, 10 aa, synthetic construct
ADSRGDRSVV

SEQ ID NO: 137904 - protein, 10 aa, synthetic construct
ADTRGDRSVV

SEQ ID NO: 137905 - protein, 10 aa, synthetic construct
ADYRGDRSVV

SEQ ID NO: 137906 - protein, 10 aa, synthetic construct
ADNRGDRSVV

SEQ ID NO: 137907 - protein, 10 aa, synthetic construct
ADQRGDRSVV

SEQ ID NO: 137908 - protein, 10 aa, synthetic construct
ADDRGDRSVV

SEQ ID NO: 137909 - protein, 10 aa, synthetic construct
ADERGDRSVV

SEQ ID NO: 137910 - protein, 10 aa, synthetic construct
AEGRGDRSVV

SEQ ID NO: 137911 - protein, 10 aa, synthetic construct
AEARGDRSVV

SEQ ID NO: 137912 - protein, 10 aa, synthetic construct
AEVRGDRSVV

SEQ ID NO: 137913 - protein, 10 aa, synthetic construct
AEPRGDRSVV

SEQ ID NO: 137914 - protein, 10 aa, synthetic construct
AELRGDRSVV

SEQ ID NO: 137915 - protein, 10 aa, synthetic construct
AEIRGDRSVV

SEQ ID NO: 137916 - protein, 10 aa, synthetic construct
AEMRGDRSVV

SEQ ID NO: 137917 - protein, 10 aa, synthetic construct
AEWRGDRSVV

SEQ ID NO: 137918 - protein, 10 aa, synthetic construct
AEFRGDRSVV

SEQ ID NO: 137919 - protein, 10 aa, synthetic construct
AEKRGDRSVV

SEQ ID NO: 137920 - protein, 10 aa, synthetic construct
AERRGDRSVV

SEQ ID NO: 137921 - protein, 10 aa, synthetic construct
AEHRGDRSVV

SEQ ID NO: 137922 - protein, 10 aa, synthetic construct
AESRGDRSVV

SEQ ID NO: 137923 - protein, 10 aa, synthetic construct
AETRGDRSVV

SEQ ID NO: 137924 - protein, 10 aa, synthetic construct
AEYRGDRSVV

SEQ ID NO: 137925 - protein, 10 aa, synthetic construct
AENRGDRSVV

SEQ ID NO: 137926 - protein, 10 aa, synthetic construct
AEQRGDRSVV

SEQ ID NO: 137927 - protein, 10 aa, synthetic construct
AEDRGDRSVV

SEQ ID NO: 137928 - protein, 10 aa, synthetic construct
AEERGDRSVV

SEQ ID NO: 137929 - protein, 10 aa, synthetic construct
EGGRGDRSVV

SEQ ID NO: 137930 - protein, 10 aa, synthetic construct
EGARGDRSVV

SEQ ID NO: 137931 - protein, 10 aa, synthetic construct
EGVRGDRSVV

SEQ ID NO: 137932 - protein, 10 aa, synthetic construct
EGPRGDRSVV

SEQ ID NO: 137933 - protein, 10 aa, synthetic construct
EGLRGDRSVV

SEQ ID NO: 137934 - protein, 10 aa, synthetic construct
EGIRGDRSVV

SEQ ID NO: 137935 - protein, 10 aa, synthetic construct
EGMRGDRSVV

SEQ ID NO: 137936 - protein, 10 aa, synthetic construct
EGWRGDRSVV

SEQ ID NO: 137937 - protein, 10 aa, synthetic construct
EGFRGDRSVV

SEQ ID NO: 137938 - protein, 10 aa, synthetic construct
EGKRGDRSVV

SEQ ID NO: 137939 - protein, 10 aa, synthetic construct
EGRRGDRSVV

SEQ ID NO: 137940 - protein, 10 aa, synthetic construct
EGHRGDRSVV

SEQ ID NO: 137941 - protein, 10 aa, synthetic construct
EGSRGDRSVV

SEQ ID NO: 137942 - protein, 10 aa, synthetic construct
EGTRGDRSVV

SEQ ID NO: 137943 - protein, 10 aa, synthetic construct
EGYRGDRSVV

SEQ ID NO: 137944 - protein, 10 aa, synthetic construct
EGNRGDRSVV

SEQ ID NO: 137945 - protein, 10 aa, synthetic construct
EGQRGDRSVV

SEQ ID NO: 137946 - protein, 10 aa, synthetic construct
EGDRGDRSVV

SEQ ID NO: 137947 - protein, 10 aa, synthetic construct
EGERGDRSVV

SEQ ID NO: 137948 - protein, 10 aa, synthetic construct
EAGRGDRSVV

SEQ ID NO: 137949 - protein, 10 aa, synthetic construct
EAARGDRSVV

SEQ ID NO: 137950 - protein, 10 aa, synthetic construct
EAVRGDRSVV

SEQ ID NO: 137951 - protein, 10 aa, synthetic construct
EAPRGDRSVV

SEQ ID NO: 137952 - protein, 10 aa, synthetic construct
EALRGDRSVV

SEQ ID NO: 137953 - protein, 10 aa, synthetic construct
EAIRGDRSVV

SEQ ID NO: 137954 - protein, 10 aa, synthetic construct
EAMRGDRSVV

SEQ ID NO: 137955 - protein, 10 aa, synthetic construct
EAWRGDRSVV

SEQ ID NO: 137956 - protein, 10 aa, synthetic construct
EAFRGDRSVV

SEQ ID NO: 137957 - protein, 10 aa, synthetic construct
EAKRGDRSVV

SEQ ID NO: 137958 - protein, 10 aa, synthetic construct
EARRGDRSVV

SEQ ID NO: 137959 - protein, 10 aa, synthetic construct
EAHRGDRSVV

SEQ ID NO: 137960 - protein, 10 aa, synthetic construct
EASRGDRSVV

SEQ ID NO: 137961 - protein, 10 aa, synthetic construct
EATRGDRSVV

SEQ ID NO: 137962 - protein, 10 aa, synthetic construct
EAYRGDRSVV

SEQ ID NO: 137963 - protein, 10 aa, synthetic construct
EANRGDRSVV

SEQ ID NO: 137964 - protein, 10 aa, synthetic construct
EAQRGDRSVV

SEQ ID NO: 137965 - protein, 10 aa, synthetic construct
EADRGDRSVV

SEQ ID NO: 137966 - protein, 10 aa, synthetic construct
EAERGDRSVV

SEQ ID NO: 137967 - protein, 10 aa, synthetic construct
EVGRGDRSVV

SEQ ID NO: 137968 - protein, 10 aa, synthetic construct
EVARGDRSVV

SEQ ID NO: 137969 - protein, 10 aa, synthetic construct
EVVRGDRSVV

SEQ ID NO: 137970 - protein, 10 aa, synthetic construct
EVPRGDRSVV

SEQ ID NO: 137971 - protein, 10 aa, synthetic construct
EVLRGDRSVV

SEQ ID NO: 137972 - protein, 10 aa, synthetic construct
EVIRGDRSVV

SEQ ID NO: 137973 - protein, 10 aa, synthetic construct
EVMRGDRSVV

SEQ ID NO: 137974 - protein, 10 aa, synthetic construct
EVWRGDRSVV

SEQ ID NO: 137975 - protein, 10 aa, synthetic construct
EVFRGDRSVV

SEQ ID NO: 137976 - protein, 10 aa, synthetic construct
EVKRGDRSVV

SEQ ID NO: 137977 - protein, 10 aa, synthetic construct
EVRRGDRSVV

SEQ ID NO: 137978 - protein, 10 aa, synthetic construct
EVHRGDRSVV

SEQ ID NO: 137979 - protein, 10 aa, synthetic construct
EVSRGDRSVV

SEQ ID NO: 137980 - protein, 10 aa, synthetic construct
EVTRGDRSVV

SEQ ID NO: 137981 - protein, 10 aa, synthetic construct
EVYRGDRSVV

SEQ ID NO: 137982 - protein, 10 aa, synthetic construct
EVNRGDRSVV

SEQ ID NO: 137983 - protein, 10 aa, synthetic construct
EVQRGDRSVV

SEQ ID NO: 137984 - protein, 10 aa, synthetic construct
EVDRGDRSVV

SEQ ID NO: 137985 - protein, 10 aa, synthetic construct
EVERGDRSVV

SEQ ID NO: 137986 - protein, 10 aa, synthetic construct
EPGRGDRSVV

SEQ ID NO: 137987 - protein, 10 aa, synthetic construct
EPARGDRSVV

SEQ ID NO: 137988 - protein, 10 aa, synthetic construct
EPVRGDRSVV

SEQ ID NO: 137989 - protein, 10 aa, synthetic construct
EPPRGDRSVV

SEQ ID NO: 137990 - protein, 10 aa, synthetic construct
EPLRGDRSVV

SEQ ID NO: 137991 - protein, 10 aa, synthetic construct
EPIRGDRSVV

SEQ ID NO: 137992 - protein, 10 aa, synthetic construct
EPMRGDRSVV

SEQ ID NO: 137993 - protein, 10 aa, synthetic construct
EPWRGDRSVV

SEQ ID NO: 137994 - protein, 10 aa, synthetic construct
EPFRGDRSVV

SEQ ID NO: 137995 - protein, 10 aa, synthetic construct
EPKRGDRSVV

SEQ ID NO: 137996 - protein, 10 aa, synthetic construct
EPRRGDRSVV

SEQ ID NO: 137997 - protein, 10 aa, synthetic construct
EPHRGDRSVV

SEQ ID NO: 137998 - protein, 10 aa, synthetic construct
EPSRGDRSVV

SEQ ID NO: 137999 - protein, 10 aa, synthetic construct
EPTRGDRSVV

SEQ ID NO: 138000 - protein, 10 aa, synthetic construct
EPYRGDRSVV

SEQ ID NO: 138001 - protein, 10 aa, synthetic construct
EPNRGDRSVV

SEQ ID NO: 138002 - protein, 10 aa, synthetic construct
EPQRGDRSVV

SEQ ID NO: 138003 - protein, 10 aa, synthetic construct
EPDRGDRSVV

SEQ ID NO: 138004 - protein, 10 aa, synthetic construct
EPERGDRSVV

SEQ ID NO: 138005 - protein, 10 aa, synthetic construct
ELGRGDRSVV

SEQ ID NO: 138006 - protein, 10 aa, synthetic construct
ELARGDRSVV

SEQ ID NO: 138007 - protein, 10 aa, synthetic construct
ELVRGDRSVV

SEQ ID NO: 138008 - protein, 10 aa, synthetic construct
ELPRGDRSVV

SEQ ID NO: 138009 - protein, 10 aa, synthetic construct
ELLRGDRSVV

SEQ ID NO: 138010 - protein, 10 aa, synthetic construct
ELIRGDRSVV

SEQ ID NO: 138011 - protein, 10 aa, synthetic construct
ELMRGDRSVV

SEQ ID NO: 138012 - protein, 10 aa, synthetic construct
ELWRGDRSVV

SEQ ID NO: 138013 - protein, 10 aa, synthetic construct
ELFRGDRSVV

SEQ ID NO: 138014 - protein, 10 aa, synthetic construct
ELKRGDRSVV

SEQ ID NO: 138015 - protein, 10 aa, synthetic construct
ELRRGDRSVV

SEQ ID NO: 138016 - protein, 10 aa, synthetic construct
ELHRGDRSVV

SEQ ID NO: 138017 - protein, 10 aa, synthetic construct
ELSRGDRSVV

SEQ ID NO: 138018 - protein, 10 aa, synthetic construct
ELTRGDRSVV

SEQ ID NO: 138019 - protein, 10 aa, synthetic construct
ELYRGDRSVV

SEQ ID NO: 138020 - protein, 10 aa, synthetic construct
ELNRGDRSVV

SEQ ID NO: 138021 - protein, 10 aa, synthetic construct
ELQRGDRSVV

SEQ ID NO: 138022 - protein, 10 aa, synthetic construct
ELDRGDRSVV

SEQ ID NO: 138023 - protein, 10 aa, synthetic construct
ELERGDRSVV

SEQ ID NO: 138024 - protein, 10 aa, synthetic construct
EIGRGDRSVV

SEQ ID NO: 138025 - protein, 10 aa, synthetic construct
EIARGDRSVV

SEQ ID NO: 138026 - protein, 10 aa, synthetic construct
EIVRGDRSVV

SEQ ID NO: 138027 - protein, 10 aa, synthetic construct
EIPRGDRSVV

SEQ ID NO: 138028 - protein, 10 aa, synthetic construct
EILRGDRSVV

SEQ ID NO: 138029 - protein, 10 aa, synthetic construct
EIIRGDRSVV

SEQ ID NO: 138030 - protein, 10 aa, synthetic construct
EIMRGDRSVV

SEQ ID NO: 138031 - protein, 10 aa, synthetic construct
EIWRGDRSVV

SEQ ID NO: 138032 - protein, 10 aa, synthetic construct
EIFRGDRSVV

SEQ ID NO: 138033 - protein, 10 aa, synthetic construct
EIKRGDRSVV

SEQ ID NO: 138034 - protein, 10 aa, synthetic construct
EIRRGDRSVV

SEQ ID NO: 138035 - protein, 10 aa, synthetic construct
EIHRGDRSVV

SEQ ID NO: 138036 - protein, 10 aa, synthetic construct
EISRGDRSVV

SEQ ID NO: 138037 - protein, 10 aa, synthetic construct
EITRGDRSVV

SEQ ID NO: 138038 - protein, 10 aa, synthetic construct
EIYRGDRSVV

SEQ ID NO: 138039 - protein, 10 aa, synthetic construct
EINRGDRSVV

SEQ ID NO: 138040 - protein, 10 aa, synthetic construct
EIQRGDRSVV

SEQ ID NO: 138041 - protein, 10 aa, synthetic construct
EIDRGDRSVV

SEQ ID NO: 138042 - protein, 10 aa, synthetic construct
EIERGDRSVV

SEQ ID NO: 138043 - protein, 10 aa, synthetic construct
EMGRGDRSVV

SEQ ID NO: 138044 - protein, 10 aa, synthetic construct
EMARGDRSVV

SEQ ID NO: 138045 - protein, 10 aa, synthetic construct
EMVRGDRSVV

SEQ ID NO: 138046 - protein, 10 aa, synthetic construct
EMPRGDRSVV

SEQ ID NO: 138047 - protein, 10 aa, synthetic construct
EMLRGDRSVV

SEQ ID NO: 138048 - protein, 10 aa, synthetic construct
EMIRGDRSVV

SEQ ID NO: 138049 - protein, 10 aa, synthetic construct
EMMRGDRSVV

SEQ ID NO: 138050 - protein, 10 aa, synthetic construct
EMWRGDRSVV

SEQ ID NO: 138051 - protein, 10 aa, synthetic construct
EMFRGDRSVV

SEQ ID NO: 138052 - protein, 10 aa, synthetic construct
EMKRGDRSVV

SEQ ID NO: 138053 - protein, 10 aa, synthetic construct
EMRRGDRSVV

SEQ ID NO: 138054 - protein, 10 aa, synthetic construct
EMHRGDRSVV

SEQ ID NO: 138055 - protein, 10 aa, synthetic construct
EMSRGDRSVV

SEQ ID NO: 138056 - protein, 10 aa, synthetic construct
EMTRGDRSVV

SEQ ID NO: 138057 - protein, 10 aa, synthetic construct
EMYRGDRSVV

SEQ ID NO: 138058 - protein, 10 aa, synthetic construct
EMNRGDRSVV

SEQ ID NO: 138059 - protein, 10 aa, synthetic construct
EMQRGDRSVV

SEQ ID NO: 138060 - protein, 10 aa, synthetic construct
EMDRGDRSVV

SEQ ID NO: 138061 - protein, 10 aa, synthetic construct
EMERGDRSVV

SEQ ID NO: 138062 - protein, 10 aa, synthetic construct
EWGRGDRSVV

SEQ ID NO: 138063 - protein, 10 aa, synthetic construct
EWARGDRSVV

SEQ ID NO: 138064 - protein, 10 aa, synthetic construct
EWVRGDRSVV

SEQ ID NO: 138065 - protein, 10 aa, synthetic construct
EWPRGDRSVV

SEQ ID NO: 138066 - protein, 10 aa, synthetic construct
EWLRGDRSVV

SEQ ID NO: 138067 - protein, 10 aa, synthetic construct
EWIRGDRSVV

SEQ ID NO: 138068 - protein, 10 aa, synthetic construct
EWMRGDRSVV

SEQ ID NO: 138069 - protein, 10 aa, synthetic construct
EWWRGDRSVV

SEQ ID NO: 138070 - protein, 10 aa, synthetic construct
EWFRGDRSVV

SEQ ID NO: 138071 - protein, 10 aa, synthetic construct
EWKRGDRSVV

SEQ ID NO: 138072 - protein, 10 aa, synthetic construct
EWRRGDRSVV

SEQ ID NO: 138073 - protein, 10 aa, synthetic construct
EWHRGDRSVV

SEQ ID NO: 138074 - protein, 10 aa, synthetic construct
EWSRGDRSVV

SEQ ID NO: 138075 - protein, 10 aa, synthetic construct
EWTRGDRSVV

SEQ ID NO: 138076 - protein, 10 aa, synthetic construct
EWYRGDRSVV

SEQ ID NO: 138077 - protein, 10 aa, synthetic construct
EWNRGDRSVV

SEQ ID NO: 138078 - protein, 10 aa, synthetic construct
EWQRGDRSVV

SEQ ID NO: 138079 - protein, 10 aa, synthetic construct
EWDRGDRSVV

SEQ ID NO: 138080 - protein, 10 aa, synthetic construct
EWERGDRSVV

SEQ ID NO: 138081 - protein, 10 aa, synthetic construct
EFGRGDRSVV

SEQ ID NO: 138082 - protein, 10 aa, synthetic construct
EFARGDRSVV

SEQ ID NO: 138083 - protein, 10 aa, synthetic construct
EFVRGDRSVV

SEQ ID NO: 138084 - protein, 10 aa, synthetic construct
EFPRGDRSVV

SEQ ID NO: 138085 - protein, 10 aa, synthetic construct
EFLRGDRSVV

SEQ ID NO: 138086 - protein, 10 aa, synthetic construct
EFIRGDRSVV

SEQ ID NO: 138087 - protein, 10 aa, synthetic construct
EFMRGDRSVV

SEQ ID NO: 138088 - protein, 10 aa, synthetic construct
EFWRGDRSVV

SEQ ID NO: 138089 - protein, 10 aa, synthetic construct
EFFRGDRSVV

SEQ ID NO: 138090 - protein, 10 aa, synthetic construct
EFKRGDRSVV

SEQ ID NO: 138091 - protein, 10 aa, synthetic construct
EFRRGDRSVV

SEQ ID NO: 138092 - protein, 10 aa, synthetic construct
EFHRGDRSVV

SEQ ID NO: 138093 - protein, 10 aa, synthetic construct
EFSRGDRSVV

SEQ ID NO: 138094 - protein, 10 aa, synthetic construct
EFTRGDRSVV

SEQ ID NO: 138095 - protein, 10 aa, synthetic construct
EFYRGDRSVV

SEQ ID NO: 138096 - protein, 10 aa, synthetic construct
EFNRGDRSVV

SEQ ID NO: 138097 - protein, 10 aa, synthetic construct
EFQRGDRSVV

SEQ ID NO: 138098 - protein, 10 aa, synthetic construct
EFDRGDRSVV

SEQ ID NO: 138099 - protein, 10 aa, synthetic construct
EFERGDRSVV

SEQ ID NO: 138100 - protein, 10 aa, synthetic construct
EKGRGDRSVV

SEQ ID NO: 138101 - protein, 10 aa, synthetic construct
EKARGDRSVV

SEQ ID NO: 138102 - protein, 10 aa, synthetic construct
EKVRGDRSVV

SEQ ID NO: 138103 - protein, 10 aa, synthetic construct
EKPRGDRSVV

SEQ ID NO: 138104 - protein, 10 aa, synthetic construct
EKLRGDRSVV

SEQ ID NO: 138105 - protein, 10 aa, synthetic construct
EKIRGDRSVV

SEQ ID NO: 138106 - protein, 10 aa, synthetic construct
EKMRGDRSVV

SEQ ID NO: 138107 - protein, 10 aa, synthetic construct
EKWRGDRSVV

SEQ ID NO: 138108 - protein, 10 aa, synthetic construct
EKFRGDRSVV

SEQ ID NO: 138109 - protein, 10 aa, synthetic construct
EKKRGDRSVV

SEQ ID NO: 138110 - protein, 10 aa, synthetic construct
EKRRGDRSVV

SEQ ID NO: 138111 - protein, 10 aa, synthetic construct
EKHRGDRSVV

SEQ ID NO: 138112 - protein, 10 aa, synthetic construct
EKSRGDRSVV

SEQ ID NO: 138113 - protein, 10 aa, synthetic construct
EKTRGDRSVV

SEQ ID NO: 138114 - protein, 10 aa, synthetic construct
EKYRGDRSVV

SEQ ID NO: 138115 - protein, 10 aa, synthetic construct
EKNRGDRSVV

SEQ ID NO: 138116 - protein, 10 aa, synthetic construct
EKQRGDRSVV

SEQ ID NO: 138117 - protein, 10 aa, synthetic construct
EKDRGDRSVV

SEQ ID NO: 138118 - protein, 10 aa, synthetic construct
EKERGDRSVV

SEQ ID NO: 138119 - protein, 10 aa, synthetic construct
ERGRGDRSVV

SEQ ID NO: 138120 - protein, 10 aa, synthetic construct
ERARGDRSVV

SEQ ID NO: 138121 - protein, 10 aa, synthetic construct
ERVRGDRSVV

SEQ ID NO: 138122 - protein, 10 aa, synthetic construct
ERPRGDRSVV

SEQ ID NO: 138123 - protein, 10 aa, synthetic construct
ERLRGDRSVV

SEQ ID NO: 138124 - protein, 10 aa, synthetic construct
ERIRGDRSVV

SEQ ID NO: 138125 - protein, 10 aa, synthetic construct
ERMRGDRSVV

SEQ ID NO: 138126 - protein, 10 aa, synthetic construct
ERWRGDRSVV

SEQ ID NO: 138127 - protein, 10 aa, synthetic construct
ERFRGDRSVV

SEQ ID NO: 138128 - protein, 10 aa, synthetic construct
ERKRGDRSVV

SEQ ID NO: 138129 - protein, 10 aa, synthetic construct
ERRRGDRSVV

SEQ ID NO: 138130 - protein, 10 aa, synthetic construct
ERHRGDRSVV

SEQ ID NO: 138131 - protein, 10 aa, synthetic construct
ERSRGDRSVV

SEQ ID NO: 138132 - protein, 10 aa, synthetic construct
ERTRGDRSVV

SEQ ID NO: 138133 - protein, 10 aa, synthetic construct
ERYRGDRSVV

SEQ ID NO: 138134 - protein, 10 aa, synthetic construct
ERNRGDRSVV

SEQ ID NO: 138135 - protein, 10 aa, synthetic construct
ERQRGDRSVV

SEQ ID NO: 138136 - protein, 10 aa, synthetic construct
ERDRGDRSVV

SEQ ID NO: 138137 - protein, 10 aa, synthetic construct
ERERGDRSVV

SEQ ID NO: 138138 - protein, 10 aa, synthetic construct
EHGRGDRSVV

SEQ ID NO: 138139 - protein, 10 aa, synthetic construct
EHARGDRSVV

SEQ ID NO: 138140 - protein, 10 aa, synthetic construct
EHVRGDRSVV

SEQ ID NO: 138141 - protein, 10 aa, synthetic construct
EHPRGDRSVV

SEQ ID NO: 138142 - protein, 10 aa, synthetic construct
EHLRGDRSVV

SEQ ID NO: 138143 - protein, 10 aa, synthetic construct
EHIRGDRSVV

SEQ ID NO: 138144 - protein, 10 aa, synthetic construct
EHMRGDRSVV

SEQ ID NO: 138145 - protein, 10 aa, synthetic construct
EHWRGDRSVV

SEQ ID NO: 138146 - protein, 10 aa, synthetic construct
EHFRGDRSVV

SEQ ID NO: 138147 - protein, 10 aa, synthetic construct
EHKRGDRSVV

SEQ ID NO: 138148 - protein, 10 aa, synthetic construct
EHRRGDRSVV

SEQ ID NO: 138149 - protein, 10 aa, synthetic construct
EHHRGDRSVV

SEQ ID NO: 138150 - protein, 10 aa, synthetic construct
EHSRGDRSVV

SEQ ID NO: 138151 - protein, 10 aa, synthetic construct
EHTRGDRSVV

SEQ ID NO: 138152 - protein, 10 aa, synthetic construct
EHYRGDRSVV

SEQ ID NO: 138153 - protein, 10 aa, synthetic construct
EHNRGDRSVV

SEQ ID NO: 138154 - protein, 10 aa, synthetic construct
EHQRGDRSVV

SEQ ID NO: 138155 - protein, 10 aa, synthetic construct
EHDRGDRSVV

SEQ ID NO: 138156 - protein, 10 aa, synthetic construct
EHERGDRSVV

SEQ ID NO: 138157 - protein, 10 aa, synthetic construct
ESGRGDRSVV

SEQ ID NO: 138158 - protein, 10 aa, synthetic construct
ESARGDRSVV

SEQ ID NO: 138159 - protein, 10 aa, synthetic construct
ESVRGDRSVV

SEQ ID NO: 138160 - protein, 10 aa, synthetic construct
ESPRGDRSVV

SEQ ID NO: 138161 - protein, 10 aa, synthetic construct
ESLRGDRSVV

SEQ ID NO: 138162 - protein, 10 aa, synthetic construct
ESIRGDRSVV

SEQ ID NO: 138163 - protein, 10 aa, synthetic construct
ESMRGDRSVV

SEQ ID NO: 138164 - protein, 10 aa, synthetic construct
ESWRGDRSVV

SEQ ID NO: 138165 - protein, 10 aa, synthetic construct
ESFRGDRSVV

SEQ ID NO: 138166 - protein, 10 aa, synthetic construct
ESKRGDRSVV

SEQ ID NO: 138167 - protein, 10 aa, synthetic construct
ESRRGDRSVV

SEQ ID NO: 138168 - protein, 10 aa, synthetic construct
ESHRGDRSVV

SEQ ID NO: 138169 - protein, 10 aa, synthetic construct
ESSRGDRSVV

SEQ ID NO: 138170 - protein, 10 aa, synthetic construct
ESTRGDRSVV

SEQ ID NO: 138171 - protein, 10 aa, synthetic construct
ESYRGDRSVV

SEQ ID NO: 138172 - protein, 10 aa, synthetic construct
ESNRGDRSVV

SEQ ID NO: 138173 - protein, 10 aa, synthetic construct
ESQRGDRSVV

SEQ ID NO: 138174 - protein, 10 aa, synthetic construct
ESDRGDRSVV

SEQ ID NO: 138175 - protein, 10 aa, synthetic construct
ESERGDRSVV

SEQ ID NO: 138176 - protein, 10 aa, synthetic construct
ETGRGDRSVV

SEQ ID NO: 138177 - protein, 10 aa, synthetic construct
ETARGDRSVV

SEQ ID NO: 138178 - protein, 10 aa, synthetic construct
ETVRGDRSVV

SEQ ID NO: 138179 - protein, 10 aa, synthetic construct
ETPRGDRSVV

SEQ ID NO: 138180 - protein, 10 aa, synthetic construct
ETLRGDRSVV

SEQ ID NO: 138181 - protein, 10 aa, synthetic construct
ETIRGDRSVV

SEQ ID NO: 138182 - protein, 10 aa, synthetic construct
ETMRGDRSVV

SEQ ID NO: 138183 - protein, 10 aa, synthetic construct
ETWRGDRSVV

SEQ ID NO: 138184 - protein, 10 aa, synthetic construct
ETFRGDRSVV

SEQ ID NO: 138185 - protein, 10 aa, synthetic construct
ETKRGDRSVV

SEQ ID NO: 138186 - protein, 10 aa, synthetic construct
ETRRGDRSVV

SEQ ID NO: 138187 - protein, 10 aa, synthetic construct
ETHRGDRSVV

SEQ ID NO: 138188 - protein, 10 aa, synthetic construct
ETSRGDRSVV

SEQ ID NO: 138189 - protein, 10 aa, synthetic construct
ETTRGDRSVV

SEQ ID NO: 138190 - protein, 10 aa, synthetic construct
ETYRGDRSVV

SEQ ID NO: 138191 - protein, 10 aa, synthetic construct
ETNRGDRSVV

SEQ ID NO: 138192 - protein, 10 aa, synthetic construct
ETQRGDRSVV

SEQ ID NO: 138193 - protein, 10 aa, synthetic construct
ETDRGDRSVV

SEQ ID NO: 138194 - protein, 10 aa, synthetic construct
ETERGDRSVV

SEQ ID NO: 138195 - protein, 10 aa, synthetic construct
EYGRGDRSVV

SEQ ID NO: 138196 - protein, 10 aa, synthetic construct
EYARGDRSVV

SEQ ID NO: 138197 - protein, 10 aa, synthetic construct
EYVRGDRSVV

SEQ ID NO: 138198 - protein, 10 aa, synthetic construct
EYPRGDRSVV

SEQ ID NO: 138199 - protein, 10 aa, synthetic construct
EYLRGDRSVV

SEQ ID NO: 138200 - protein, 10 aa, synthetic construct
EYIRGDRSVV

SEQ ID NO: 138201 - protein, 10 aa, synthetic construct
EYMRGDRSVV

SEQ ID NO: 138202 - protein, 10 aa, synthetic construct
EYWRGDRSVV

SEQ ID NO: 138203 - protein, 10 aa, synthetic construct
EYFRGDRSVV

SEQ ID NO: 138204 - protein, 10 aa, synthetic construct
EYKRGDRSVV

SEQ ID NO: 138205 - protein, 10 aa, synthetic construct
EYRRGDRSVV

SEQ ID NO: 138206 - protein, 10 aa, synthetic construct
EYHRGDRSVV

SEQ ID NO: 138207 - protein, 10 aa, synthetic construct
EYSRGDRSVV

SEQ ID NO: 138208 - protein, 10 aa, synthetic construct
EYTRGDRSVV

SEQ ID NO: 138209 - protein, 10 aa, synthetic construct
EYYRGDRSVV

SEQ ID NO: 138210 - protein, 10 aa, synthetic construct
EYNRGDRSVV

SEQ ID NO: 138211 - protein, 10 aa, synthetic construct
EYQRGDRSVV

SEQ ID NO: 138212 - protein, 10 aa, synthetic construct
EYDRGDRSVV

SEQ ID NO: 138213 - protein, 10 aa, synthetic construct
EYERGDRSVV

SEQ ID NO: 138214 - protein, 10 aa, synthetic construct
ENGRGDRSVV

SEQ ID NO: 138215 - protein, 10 aa, synthetic construct
ENARGDRSVV

SEQ ID NO: 138216 - protein, 10 aa, synthetic construct
ENVRGDRSVV

SEQ ID NO: 138217 - protein, 10 aa, synthetic construct
ENPRGDRSVV

SEQ ID NO: 138218 - protein, 10 aa, synthetic construct
ENLRGDRSVV

SEQ ID NO: 138219 - protein, 10 aa, synthetic construct
ENIRGDRSVV

SEQ ID NO: 138220 - protein, 10 aa, synthetic construct
ENMRGDRSVV

SEQ ID NO: 138221 - protein, 10 aa, synthetic construct
ENWRGDRSVV

SEQ ID NO: 138222 - protein, 10 aa, synthetic construct
ENFRGDRSVV

SEQ ID NO: 138223 - protein, 10 aa, synthetic construct
ENKRGDRSVV

SEQ ID NO: 138224 - protein, 10 aa, synthetic construct
ENRRGDRSVV

SEQ ID NO: 138225 - protein, 10 aa, synthetic construct
ENHRGDRSVV

SEQ ID NO: 138226 - protein, 10 aa, synthetic construct
ENSRGDRSVV

SEQ ID NO: 138227 - protein, 10 aa, synthetic construct
ENTRGDRSVV

SEQ ID NO: 138228 - protein, 10 aa, synthetic construct
ENYRGDRSVV

SEQ ID NO: 138229 - protein, 10 aa, synthetic construct
ENNRGDRSVV

SEQ ID NO: 138230 - protein, 10 aa, synthetic construct
ENQRGDRSVV

SEQ ID NO: 138231 - protein, 10 aa, synthetic construct
ENDRGDRSVV

SEQ ID NO: 138232 - protein, 10 aa, synthetic construct
ENERGDRSVV

SEQ ID NO: 138233 - protein, 10 aa, synthetic construct
EQGRGDRSVV

SEQ ID NO: 138234 - protein, 10 aa, synthetic construct
EQARGDRSVV

SEQ ID NO: 138235 - protein, 10 aa, synthetic construct
EQVRGDRSVV

SEQ ID NO: 138236 - protein, 10 aa, synthetic construct
EQPRGDRSVV

SEQ ID NO: 138237 - protein, 10 aa, synthetic construct
EQLRGDRSVV

SEQ ID NO: 138238 - protein, 10 aa, synthetic construct
EQIRGDRSVV

SEQ ID NO: 138239 - protein, 10 aa, synthetic construct
EQMRGDRSVV

SEQ ID NO: 138240 - protein, 10 aa, synthetic construct
EQWRGDRSVV

SEQ ID NO: 138241 - protein, 10 aa, synthetic construct
EQFRGDRSVV

SEQ ID NO: 138242 - protein, 10 aa, synthetic construct
EQKRGDRSVV

SEQ ID NO: 138243 - protein, 10 aa, synthetic construct
EQRRGDRSVV

SEQ ID NO: 138244 - protein, 10 aa, synthetic construct
EQHRGDRSVV

SEQ ID NO: 138245 - protein, 10 aa, synthetic construct
EQSRGDRSVV

SEQ ID NO: 138246 - protein, 10 aa, synthetic construct
EQTRGDRSVV

SEQ ID NO: 138247 - protein, 10 aa, synthetic construct
EQYRGDRSVV

SEQ ID NO: 138248 - protein, 10 aa, synthetic construct
EQNRGDRSVV

SEQ ID NO: 138249 - protein, 10 aa, synthetic construct
EQQRGDRSVV

SEQ ID NO: 138250 - protein, 10 aa, synthetic construct
EQDRGDRSVV

SEQ ID NO: 138251 - protein, 10 aa, synthetic construct
EQERGDRSVV

SEQ ID NO: 138252 - protein, 10 aa, synthetic construct
EDGRGDRSVV

SEQ ID NO: 138253 - protein, 10 aa, synthetic construct
EDARGDRSVV

SEQ ID NO: 138254 - protein, 10 aa, synthetic construct
EDVRGDRSVV

SEQ ID NO: 138255 - protein, 10 aa, synthetic construct
EDPRGDRSVV

SEQ ID NO: 138256 - protein, 10 aa, synthetic construct
EDLRGDRSVV

SEQ ID NO: 138257 - protein, 10 aa, synthetic construct
EDIRGDRSVV

SEQ ID NO: 138258 - protein, 10 aa, synthetic construct
EDMRGDRSVV

SEQ ID NO: 138259 - protein, 10 aa, synthetic construct
EDWRGDRSVV

SEQ ID NO: 138260 - protein, 10 aa, synthetic construct
EDFRGDRSVV

SEQ ID NO: 138261 - protein, 10 aa, synthetic construct
EDKRGDRSVV

SEQ ID NO: 138262 - protein, 10 aa, synthetic construct
EDRRGDRSVV

SEQ ID NO: 138263 - protein, 10 aa, synthetic construct
EDHRGDRSVV

SEQ ID NO: 138264 - protein, 10 aa, synthetic construct
EDSRGDRSVV

SEQ ID NO: 138265 - protein, 10 aa, synthetic construct
EDTRGDRSVV

SEQ ID NO: 138266 - protein, 10 aa, synthetic construct
EDYRGDRSVV

SEQ ID NO: 138267 - protein, 10 aa, synthetic construct
EDNRGDRSVV

SEQ ID NO: 138268 - protein, 10 aa, synthetic construct
EDQRGDRSVV

SEQ ID NO: 138269 - protein, 10 aa, synthetic construct
EDDRGDRSVV

SEQ ID NO: 138270 - protein, 10 aa, synthetic construct
EDERGDRSVV

SEQ ID NO: 138271 - protein, 10 aa, synthetic construct
EEGRGDRSVV

SEQ ID NO: 138272 - protein, 10 aa, synthetic construct
EEARGDRSVV

SEQ ID NO: 138273 - protein, 10 aa, synthetic construct
EEVRGDRSVV

SEQ ID NO: 138274 - protein, 10 aa, synthetic construct
EEPRGDRSVV

SEQ ID NO: 138275 - protein, 10 aa, synthetic construct
EELRGDRSVV

SEQ ID NO: 138276 - protein, 10 aa, synthetic construct
EEIRGDRSVV

SEQ ID NO: 138277 - protein, 10 aa, synthetic construct
EEMRGDRSVV

SEQ ID NO: 138278 - protein, 10 aa, synthetic construct
EEWRGDRSVV

SEQ ID NO: 138279 - protein, 10 aa, synthetic construct
EEFRGDRSVV

SEQ ID NO: 138280 - protein, 10 aa, synthetic construct
EEKRGDRSVV

SEQ ID NO: 138281 - protein, 10 aa, synthetic construct
EERRGDRSVV

SEQ ID NO: 138282 - protein, 10 aa, synthetic construct
EEHRGDRSVV

SEQ ID NO: 138283 - protein, 10 aa, synthetic construct
EESRGDRSVV

SEQ ID NO: 138284 - protein, 10 aa, synthetic construct
EETRGDRSVV

SEQ ID NO: 138285 - protein, 10 aa, synthetic construct
EEYRGDRSVV

SEQ ID NO: 138286 - protein, 10 aa, synthetic construct
EENRGDRSVV

SEQ ID NO: 138287 - protein, 10 aa, synthetic construct
EEQRGDRSVV

SEQ ID NO: 138288 - protein, 10 aa, synthetic construct
EEDRGDRSVV

SEQ ID NO: 138289 - protein, 10 aa, synthetic construct
EEERGDRSVV

SEQ ID NO: 138290 - protein, 10 aa, synthetic construct
NGGRGDRSVV

SEQ ID NO: 138291 - protein, 10 aa, synthetic construct
NGARGDRSVV

SEQ ID NO: 138292 - protein, 10 aa, synthetic construct
NGVRGDRSVV

SEQ ID NO: 138293 - protein, 10 aa, synthetic construct
NGPRGDRSVV

SEQ ID NO: 138294 - protein, 10 aa, synthetic construct
NGLRGDRSVV

SEQ ID NO: 138295 - protein, 10 aa, synthetic construct
NGIRGDRSVV

SEQ ID NO: 138296 - protein, 10 aa, synthetic construct
NGMRGDRSVV

SEQ ID NO: 138297 - protein, 10 aa, synthetic construct
NGWRGDRSVV

SEQ ID NO: 138298 - protein, 10 aa, synthetic construct
NGFRGDRSVV

SEQ ID NO: 138299 - protein, 10 aa, synthetic construct
NGKRGDRSVV

SEQ ID NO: 138300 - protein, 10 aa, synthetic construct
NGRRGDRSVV

SEQ ID NO: 138301 - protein, 10 aa, synthetic construct
NGHRGDRSVV

SEQ ID NO: 138302 - protein, 10 aa, synthetic construct
NGSRGDRSVV

SEQ ID NO: 138303 - protein, 10 aa, synthetic construct
NGTRGDRSVV

SEQ ID NO: 138304 - protein, 10 aa, synthetic construct
NGYRGDRSVV

SEQ ID NO: 138305 - protein, 10 aa, synthetic construct
NGNRGDRSVV

SEQ ID NO: 138306 - protein, 10 aa, synthetic construct
NGQRGDRSVV

SEQ ID NO: 138307 - protein, 10 aa, synthetic construct
NGDRGDRSVV

SEQ ID NO: 138308 - protein, 10 aa, synthetic construct
NGERGDRSVV

SEQ ID NO: 138309 - protein, 10 aa, synthetic construct
NAGRGDRSVV

SEQ ID NO: 138310 - protein, 10 aa, synthetic construct
NAARGDRSVV

SEQ ID NO: 138311 - protein, 10 aa, synthetic construct
NAVRGDRSVV

SEQ ID NO: 138312 - protein, 10 aa, synthetic construct
NAPRGDRSVV

SEQ ID NO: 138313 - protein, 10 aa, synthetic construct
NALRGDRSVV

SEQ ID NO: 138314 - protein, 10 aa, synthetic construct
NAIRGDRSVV

SEQ ID NO: 138315 - protein, 10 aa, synthetic construct
NAMRGDRSVV

SEQ ID NO: 138316 - protein, 10 aa, synthetic construct
NAWRGDRSVV

SEQ ID NO: 138317 - protein, 10 aa, synthetic construct
NAFRGDRSVV

SEQ ID NO: 138318 - protein, 10 aa, synthetic construct
NAKRGDRSVV

SEQ ID NO: 138319 - protein, 10 aa, synthetic construct
NARRGDRSVV

SEQ ID NO: 138320 - protein, 10 aa, synthetic construct
NAHRGDRSVV

SEQ ID NO: 138321 - protein, 10 aa, synthetic construct
NASRGDRSVV

SEQ ID NO: 138322 - protein, 10 aa, synthetic construct
NATRGDRSVV

SEQ ID NO: 138323 - protein, 10 aa, synthetic construct
NAYRGDRSVV

SEQ ID NO: 138324 - protein, 10 aa, synthetic construct
NANRGDRSVV

SEQ ID NO: 138325 - protein, 10 aa, synthetic construct
NAQRGDRSVV

SEQ ID NO: 138326 - protein, 10 aa, synthetic construct
NADRGDRSVV

SEQ ID NO: 138327 - protein, 10 aa, synthetic construct
NAERGDRSVV

SEQ ID NO: 138328 - protein, 10 aa, synthetic construct
NVGRGDRSVV

SEQ ID NO: 138329 - protein, 10 aa, synthetic construct
NVARGDRSVV

SEQ ID NO: 138330 - protein, 10 aa, synthetic construct
NVVRGDRSVV

SEQ ID NO: 138331 - protein, 10 aa, synthetic construct
NVPRGDRSVV

SEQ ID NO: 138332 - protein, 10 aa, synthetic construct
NVLRGDRSVV

SEQ ID NO: 138333 - protein, 10 aa, synthetic construct
NVIRGDRSVV

SEQ ID NO: 138334 - protein, 10 aa, synthetic construct
NVMRGDRSVV

SEQ ID NO: 138335 - protein, 10 aa, synthetic construct
NVWRGDRSVV

SEQ ID NO: 138336 - protein, 10 aa, synthetic construct
NVFRGDRSVV

SEQ ID NO: 138337 - protein, 10 aa, synthetic construct
NVKRGDRSVV

SEQ ID NO: 138338 - protein, 10 aa, synthetic construct
NVRRGDRSVV

SEQ ID NO: 138339 - protein, 10 aa, synthetic construct
NVHRGDRSVV

SEQ ID NO: 138340 - protein, 10 aa, synthetic construct
NVSRGDRSVV

SEQ ID NO: 138341 - protein, 10 aa, synthetic construct
NVTRGDRSVV

SEQ ID NO: 138342 - protein, 10 aa, synthetic construct
NVYRGDRSVV

SEQ ID NO: 138343 - protein, 10 aa, synthetic construct
NVNRGDRSVV

SEQ ID NO: 138344 - protein, 10 aa, synthetic construct
NVQRGDRSVV

SEQ ID NO: 138345 - protein, 10 aa, synthetic construct
NVDRGDRSVV

SEQ ID NO: 138346 - protein, 10 aa, synthetic construct
NVERGDRSVV

SEQ ID NO: 138347 - protein, 10 aa, synthetic construct
NPGRGDRSVV

SEQ ID NO: 138348 - protein, 10 aa, synthetic construct
NPARGDRSVV

SEQ ID NO: 138349 - protein, 10 aa, synthetic construct
NPVRGDRSVV

SEQ ID NO: 138350 - protein, 10 aa, synthetic construct
NPPRGDRSVV

SEQ ID NO: 138351 - protein, 10 aa, synthetic construct
NPLRGDRSVV

SEQ ID NO: 138352 - protein, 10 aa, synthetic construct
NPIRGDRSVV

SEQ ID NO: 138353 - protein, 10 aa, synthetic construct
NPMRGDRSVV

SEQ ID NO: 138354 - protein, 10 aa, synthetic construct
NPWRGDRSVV

SEQ ID NO: 138355 - protein, 10 aa, synthetic construct
NPFRGDRSVV

SEQ ID NO: 138356 - protein, 10 aa, synthetic construct
NPKRGDRSVV

SEQ ID NO: 138357 - protein, 10 aa, synthetic construct
NPRRGDRSVV

SEQ ID NO: 138358 - protein, 10 aa, synthetic construct
NPHRGDRSVV

SEQ ID NO: 138359 - protein, 10 aa, synthetic construct
NPSRGDRSVV

SEQ ID NO: 138360 - protein, 10 aa, synthetic construct
NPTRGDRSVV

SEQ ID NO: 138361 - protein, 10 aa, synthetic construct
NPYRGDRSVV

SEQ ID NO: 138362 - protein, 10 aa, synthetic construct
NPNRGDRSVV

SEQ ID NO: 138363 - protein, 10 aa, synthetic construct
NPQRGDRSVV

SEQ ID NO: 138364 - protein, 10 aa, synthetic construct
NPDRGDRSVV

SEQ ID NO: 138365 - protein, 10 aa, synthetic construct
NPERGDRSVV

SEQ ID NO: 138366 - protein, 10 aa, synthetic construct
NLGRGDRSVV

SEQ ID NO: 138367 - protein, 10 aa, synthetic construct
NLARGDRSVV

SEQ ID NO: 138368 - protein, 10 aa, synthetic construct
NLVRGDRSVV

SEQ ID NO: 138369 - protein, 10 aa, synthetic construct
NLPRGDRSVV

SEQ ID NO: 138370 - protein, 10 aa, synthetic construct
NLLRGDRSVV

SEQ ID NO: 138371 - protein, 10 aa, synthetic construct
NLIRGDRSVV

SEQ ID NO: 138372 - protein, 10 aa, synthetic construct
NLMRGDRSVV

SEQ ID NO: 138373 - protein, 10 aa, synthetic construct
NLWRGDRSVV

SEQ ID NO: 138374 - protein, 10 aa, synthetic construct
NLFRGDRSVV

SEQ ID NO: 138375 - protein, 10 aa, synthetic construct
NLKRGDRSVV

SEQ ID NO: 138376 - protein, 10 aa, synthetic construct
NLRRGDRSVV

SEQ ID NO: 138377 - protein, 10 aa, synthetic construct
NLHRGDRSVV

SEQ ID NO: 138378 - protein, 10 aa, synthetic construct
NLSRGDRSVV

SEQ ID NO: 138379 - protein, 10 aa, synthetic construct
NLTRGDRSVV

SEQ ID NO: 138380 - protein, 10 aa, synthetic construct
NLYRGDRSVV

SEQ ID NO: 138381 - protein, 10 aa, synthetic construct
NLNRGDRSVV

SEQ ID NO: 138382 - protein, 10 aa, synthetic construct
NLQRGDRSVV

SEQ ID NO: 138383 - protein, 10 aa, synthetic construct
NLDRGDRSVV

SEQ ID NO: 138384 - protein, 10 aa, synthetic construct
NLERGDRSVV

SEQ ID NO: 138385 - protein, 10 aa, synthetic construct
NIGRGDRSVV

SEQ ID NO: 138386 - protein, 10 aa, synthetic construct
NIARGDRSVV

SEQ ID NO: 138387 - protein, 10 aa, synthetic construct
NIVRGDRSVV

SEQ ID NO: 138388 - protein, 10 aa, synthetic construct
NIPRGDRSVV

SEQ ID NO: 138389 - protein, 10 aa, synthetic construct
NILRGDRSVV

SEQ ID NO: 138390 - protein, 10 aa, synthetic construct
NIIRGDRSVV

SEQ ID NO: 138391 - protein, 10 aa, synthetic construct
NIMRGDRSVV

SEQ ID NO: 138392 - protein, 10 aa, synthetic construct
NIWRGDRSVV

SEQ ID NO: 138393 - protein, 10 aa, synthetic construct
NIFRGDRSVV

SEQ ID NO: 138394 - protein, 10 aa, synthetic construct
NIKRGDRSVV

SEQ ID NO: 138395 - protein, 10 aa, synthetic construct
NIRRGDRSVV

SEQ ID NO: 138396 - protein, 10 aa, synthetic construct
NIHRGDRSVV

SEQ ID NO: 138397 - protein, 10 aa, synthetic construct
NISRGDRSVV

SEQ ID NO: 138398 - protein, 10 aa, synthetic construct
NITRGDRSVV

SEQ ID NO: 138399 - protein, 10 aa, synthetic construct
NIYRGDRSVV

SEQ ID NO: 138400 - protein, 10 aa, synthetic construct
NINRGDRSVV

SEQ ID NO: 138401 - protein, 10 aa, synthetic construct
NIQRGDRSVV

SEQ ID NO: 138402 - protein, 10 aa, synthetic construct
NIDRGDRSVV

SEQ ID NO: 138403 - protein, 10 aa, synthetic construct
NIERGDRSVV

SEQ ID NO: 138404 - protein, 10 aa, synthetic construct
NMGRGDRSVV

SEQ ID NO: 138405 - protein, 10 aa, synthetic construct
NMARGDRSVV

SEQ ID NO: 138406 - protein, 10 aa, synthetic construct
NMVRGDRSVV

SEQ ID NO: 138407 - protein, 10 aa, synthetic construct
NMPRGDRSVV

SEQ ID NO: 138408 - protein, 10 aa, synthetic construct
NMLRGDRSVV

SEQ ID NO: 138409 - protein, 10 aa, synthetic construct
NMIRGDRSVV

SEQ ID NO: 138410 - protein, 10 aa, synthetic construct
NMMRGDRSVV

SEQ ID NO: 138411 - protein, 10 aa, synthetic construct
NMWRGDRSVV

SEQ ID NO: 138412 - protein, 10 aa, synthetic construct
NMFRGDRSVV

SEQ ID NO: 138413 - protein, 10 aa, synthetic construct
NMKRGDRSVV

SEQ ID NO: 138414 - protein, 10 aa, synthetic construct
NMRRGDRSVV

SEQ ID NO: 138415 - protein, 10 aa, synthetic construct
NMHRGDRSVV

SEQ ID NO: 138416 - protein, 10 aa, synthetic construct
NMSRGDRSVV

SEQ ID NO: 138417 - protein, 10 aa, synthetic construct
NMTRGDRSVV

SEQ ID NO: 138418 - protein, 10 aa, synthetic construct
NMYRGDRSVV

SEQ ID NO: 138419 - protein, 10 aa, synthetic construct
NMNRGDRSVV

SEQ ID NO: 138420 - protein, 10 aa, synthetic construct
NMQRGDRSVV

SEQ ID NO: 138421 - protein, 10 aa, synthetic construct
NMDRGDRSVV

SEQ ID NO: 138422 - protein, 10 aa, synthetic construct
NMERGDRSVV

SEQ ID NO: 138423 - protein, 10 aa, synthetic construct
NWGRGDRSVV

SEQ ID NO: 138424 - protein, 10 aa, synthetic construct
NWARGDRSVV

SEQ ID NO: 138425 - protein, 10 aa, synthetic construct
NWVRGDRSVV

SEQ ID NO: 138426 - protein, 10 aa, synthetic construct
NWPRGDRSVV

SEQ ID NO: 138427 - protein, 10 aa, synthetic construct
NWLRGDRSVV

SEQ ID NO: 138428 - protein, 10 aa, synthetic construct
NWIRGDRSVV

SEQ ID NO: 138429 - protein, 10 aa, synthetic construct
NWMRGDRSVV

SEQ ID NO: 138430 - protein, 10 aa, synthetic construct
NWWRGDRSVV

SEQ ID NO: 138431 - protein, 10 aa, synthetic construct
NWFRGDRSVV

SEQ ID NO: 138432 - protein, 10 aa, synthetic construct
NWKRGDRSVV

SEQ ID NO: 138433 - protein, 10 aa, synthetic construct
NWRRGDRSVV

SEQ ID NO: 138434 - protein, 10 aa, synthetic construct
NWHRGDRSVV

SEQ ID NO: 138435 - protein, 10 aa, synthetic construct
NWSRGDRSVV

SEQ ID NO: 138436 - protein, 10 aa, synthetic construct
NWTRGDRSVV

SEQ ID NO: 138437 - protein, 10 aa, synthetic construct
NWYRGDRSVV

SEQ ID NO: 138438 - protein, 10 aa, synthetic construct
NWNRGDRSVV

SEQ ID NO: 138439 - protein, 10 aa, synthetic construct
NWQRGDRSVV

SEQ ID NO: 138440 - protein, 10 aa, synthetic construct
NWDRGDRSVV

SEQ ID NO: 138441 - protein, 10 aa, synthetic construct
NWERGDRSVV

SEQ ID NO: 138442 - protein, 10 aa, synthetic construct
NFGRGDRSVV

SEQ ID NO: 138443 - protein, 10 aa, synthetic construct
NFARGDRSVV

SEQ ID NO: 138444 - protein, 10 aa, synthetic construct
NFVRGDRSVV

SEQ ID NO: 138445 - protein, 10 aa, synthetic construct
NFPRGDRSVV

SEQ ID NO: 138446 - protein, 10 aa, synthetic construct
NFLRGDRSVV

SEQ ID NO: 138447 - protein, 10 aa, synthetic construct
NFIRGDRSVV

SEQ ID NO: 138448 - protein, 10 aa, synthetic construct
NFMRGDRSVV

SEQ ID NO: 138449 - protein, 10 aa, synthetic construct
NFWRGDRSVV

SEQ ID NO: 138450 - protein, 10 aa, synthetic construct
NFFRGDRSVV

SEQ ID NO: 138451 - protein, 10 aa, synthetic construct
NFKRGDRSVV

SEQ ID NO: 138452 - protein, 10 aa, synthetic construct
NFRRGDRSVV

SEQ ID NO: 138453 - protein, 10 aa, synthetic construct
NFHRGDRSVV

SEQ ID NO: 138454 - protein, 10 aa, synthetic construct
NFSRGDRSVV

SEQ ID NO: 138455 - protein, 10 aa, synthetic construct
NFTRGDRSVV

SEQ ID NO: 138456 - protein, 10 aa, synthetic construct
NFYRGDRSVV

SEQ ID NO: 138457 - protein, 10 aa, synthetic construct
NFNRGDRSVV

SEQ ID NO: 138458 - protein, 10 aa, synthetic construct
NFQRGDRSVV

SEQ ID NO: 138459 - protein, 10 aa, synthetic construct
NFDRGDRSVV

SEQ ID NO: 138460 - protein, 10 aa, synthetic construct
NFERGDRSVV

SEQ ID NO: 138461 - protein, 10 aa, synthetic construct
NKGRGDRSVV

SEQ ID NO: 138462 - protein, 10 aa, synthetic construct
NKARGDRSVV

SEQ ID NO: 138463 - protein, 10 aa, synthetic construct
NKVRGDRSVV

SEQ ID NO: 138464 - protein, 10 aa, synthetic construct
NKPRGDRSVV

SEQ ID NO: 138465 - protein, 10 aa, synthetic construct
NKLRGDRSVV

SEQ ID NO: 138466 - protein, 10 aa, synthetic construct
NKIRGDRSVV

SEQ ID NO: 138467 - protein, 10 aa, synthetic construct
NKMRGDRSVV

SEQ ID NO: 138468 - protein, 10 aa, synthetic construct
NKWRGDRSVV

SEQ ID NO: 138469 - protein, 10 aa, synthetic construct
NKFRGDRSVV

SEQ ID NO: 138470 - protein, 10 aa, synthetic construct
NKKRGDRSVV

SEQ ID NO: 138471 - protein, 10 aa, synthetic construct
NKRRGDRSVV

SEQ ID NO: 138472 - protein, 10 aa, synthetic construct
NKHRGDRSVV

SEQ ID NO: 138473 - protein, 10 aa, synthetic construct
NKSRGDRSVV

SEQ ID NO: 138474 - protein, 10 aa, synthetic construct
NKTRGDRSVV

SEQ ID NO: 138475 - protein, 10 aa, synthetic construct
NKYRGDRSVV

SEQ ID NO: 138476 - protein, 10 aa, synthetic construct
NKNRGDRSVV

SEQ ID NO: 138477 - protein, 10 aa, synthetic construct
NKQRGDRSVV

SEQ ID NO: 138478 - protein, 10 aa, synthetic construct
NKDRGDRSVV

SEQ ID NO: 138479 - protein, 10 aa, synthetic construct
NKERGDRSVV

SEQ ID NO: 138480 - protein, 10 aa, synthetic construct
NRGRGDRSVV

SEQ ID NO: 138481 - protein, 10 aa, synthetic construct
NRARGDRSVV

SEQ ID NO: 138482 - protein, 10 aa, synthetic construct
NRVRGDRSVV

SEQ ID NO: 138483 - protein, 10 aa, synthetic construct
NRPRGDRSVV

SEQ ID NO: 138484 - protein, 10 aa, synthetic construct
NRLRGDRSVV

SEQ ID NO: 138485 - protein, 10 aa, synthetic construct
NRIRGDRSVV

SEQ ID NO: 138486 - protein, 10 aa, synthetic construct
NRMRGDRSVV

SEQ ID NO: 138487 - protein, 10 aa, synthetic construct
NRWRGDRSVV

SEQ ID NO: 138488 - protein, 10 aa, synthetic construct
NRFRGDRSVV

SEQ ID NO: 138489 - protein, 10 aa, synthetic construct
NRKRGDRSVV

SEQ ID NO: 138490 - protein, 10 aa, synthetic construct
NRRRGDRSVV

SEQ ID NO: 138491 - protein, 10 aa, synthetic construct
NRHRGDRSVV

SEQ ID NO: 138492 - protein, 10 aa, synthetic construct
NRSRGDRSVV

SEQ ID NO: 138493 - protein, 10 aa, synthetic construct
NRTRGDRSVV

SEQ ID NO: 138494 - protein, 10 aa, synthetic construct
NRYRGDRSVV

SEQ ID NO: 138495 - protein, 10 aa, synthetic construct
NRNRGDRSVV

SEQ ID NO: 138496 - protein, 10 aa, synthetic construct
NRQRGDRSVV

SEQ ID NO: 138497 - protein, 10 aa, synthetic construct
NRDRGDRSVV

SEQ ID NO: 138498 - protein, 10 aa, synthetic construct
NRERGDRSVV

SEQ ID NO: 138499 - protein, 10 aa, synthetic construct
NHGRGDRSVV

SEQ ID NO: 138500 - protein, 10 aa, synthetic construct
NHARGDRSVV

SEQ ID NO: 138501 - protein, 10 aa, synthetic construct
NHVRGDRSVV

SEQ ID NO: 138502 - protein, 10 aa, synthetic construct
NHPRGDRSVV

SEQ ID NO: 138503 - protein, 10 aa, synthetic construct
NHLRGDRSVV

SEQ ID NO: 138504 - protein, 10 aa, synthetic construct
NHIRGDRSVV

SEQ ID NO: 138505 - protein, 10 aa, synthetic construct
NHMRGDRSVV

SEQ ID NO: 138506 - protein, 10 aa, synthetic construct
NHWRGDRSVV

SEQ ID NO: 138507 - protein, 10 aa, synthetic construct
NHFRGDRSVV

SEQ ID NO: 138508 - protein, 10 aa, synthetic construct
NHKRGDRSVV

SEQ ID NO: 138509 - protein, 10 aa, synthetic construct
NHRRGDRSVV

SEQ ID NO: 138510 - protein, 10 aa, synthetic construct
NHHRGDRSVV

SEQ ID NO: 138511 - protein, 10 aa, synthetic construct
NHSRGDRSVV

SEQ ID NO: 138512 - protein, 10 aa, synthetic construct
NHTRGDRSVV

SEQ ID NO: 138513 - protein, 10 aa, synthetic construct
NHYRGDRSVV

SEQ ID NO: 138514 - protein, 10 aa, synthetic construct
NHNRGDRSVV

SEQ ID NO: 138515 - protein, 10 aa, synthetic construct
NHQRGDRSVV

SEQ ID NO: 138516 - protein, 10 aa, synthetic construct
NHDRGDRSVV

SEQ ID NO: 138517 - protein, 10 aa, synthetic construct
NHERGDRSVV

SEQ ID NO: 138518 - protein, 10 aa, synthetic construct
NSGRGDRSVV

SEQ ID NO: 138519 - protein, 10 aa, synthetic construct
NSARGDRSVV

SEQ ID NO: 138520 - protein, 10 aa, synthetic construct
NSVRGDRSVV

SEQ ID NO: 138521 - protein, 10 aa, synthetic construct
NSPRGDRSVV

SEQ ID NO: 138522 - protein, 10 aa, synthetic construct
NSLRGDRSVV

SEQ ID NO: 138523 - protein, 10 aa, synthetic construct
NSIRGDRSVV

SEQ ID NO: 138524 - protein, 10 aa, synthetic construct
NSMRGDRSVV

SEQ ID NO: 138525 - protein, 10 aa, synthetic construct
NSWRGDRSVV

SEQ ID NO: 138526 - protein, 10 aa, synthetic construct
NSFRGDRSVV

SEQ ID NO: 138527 - protein, 10 aa, synthetic construct
NSKRGDRSVV

SEQ ID NO: 138528 - protein, 10 aa, synthetic construct
NSRRGDRSVV

SEQ ID NO: 138529 - protein, 10 aa, synthetic construct
NSHRGDRSVV

SEQ ID NO: 138530 - protein, 10 aa, synthetic construct
NSSRGDRSVV

SEQ ID NO: 138531 - protein, 10 aa, synthetic construct
NSTRGDRSVV

SEQ ID NO: 138532 - protein, 10 aa, synthetic construct
NSYRGDRSVV

SEQ ID NO: 138533 - protein, 10 aa, synthetic construct
NSNRGDRSVV

SEQ ID NO: 138534 - protein, 10 aa, synthetic construct
NSQRGDRSVV

SEQ ID NO: 138535 - protein, 10 aa, synthetic construct
NSDRGDRSVV

SEQ ID NO: 138536 - protein, 10 aa, synthetic construct
NSERGDRSVV

SEQ ID NO: 138537 - protein, 10 aa, synthetic construct
NTGRGDRSVV

SEQ ID NO: 138538 - protein, 10 aa, synthetic construct
NTARGDRSVV

SEQ ID NO: 138539 - protein, 10 aa, synthetic construct
NTVRGDRSVV

SEQ ID NO: 138540 - protein, 10 aa, synthetic construct
NTPRGDRSVV

SEQ ID NO: 138541 - protein, 10 aa, synthetic construct
NTLRGDRSVV

SEQ ID NO: 138542 - protein, 10 aa, synthetic construct
NTIRGDRSVV

SEQ ID NO: 138543 - protein, 10 aa, synthetic construct
NTMRGDRSVV

SEQ ID NO: 138544 - protein, 10 aa, synthetic construct
NTWRGDRSVV

SEQ ID NO: 138545 - protein, 10 aa, synthetic construct
NTFRGDRSVV

SEQ ID NO: 138546 - protein, 10 aa, synthetic construct
NTKRGDRSVV

SEQ ID NO: 138547 - protein, 10 aa, synthetic construct
NTRRGDRSVV

SEQ ID NO: 138548 - protein, 10 aa, synthetic construct
NTHRGDRSVV

SEQ ID NO: 138549 - protein, 10 aa, synthetic construct
NTSRGDRSVV

SEQ ID NO: 138550 - protein, 10 aa, synthetic construct
NTTRGDRSVV

SEQ ID NO: 138551 - protein, 10 aa, synthetic construct
NTYRGDRSVV

SEQ ID NO: 138552 - protein, 10 aa, synthetic construct
NTNRGDRSVV

SEQ ID NO: 138553 - protein, 10 aa, synthetic construct
NTQRGDRSVV

SEQ ID NO: 138554 - protein, 10 aa, synthetic construct
NTDRGDRSVV

SEQ ID NO: 138555 - protein, 10 aa, synthetic construct
NTERGDRSVV

SEQ ID NO: 138556 - protein, 10 aa, synthetic construct
NYGRGDRSVV

SEQ ID NO: 138557 - protein, 10 aa, synthetic construct
NYARGDRSVV

SEQ ID NO: 138558 - protein, 10 aa, synthetic construct
NYVRGDRSVV

SEQ ID NO: 138559 - protein, 10 aa, synthetic construct
NYPRGDRSVV

SEQ ID NO: 138560 - protein, 10 aa, synthetic construct
NYLRGDRSVV

SEQ ID NO: 138561 - protein, 10 aa, synthetic construct
NYIRGDRSVV

SEQ ID NO: 138562 - protein, 10 aa, synthetic construct
NYMRGDRSVV

SEQ ID NO: 138563 - protein, 10 aa, synthetic construct
NYWRGDRSVV

SEQ ID NO: 138564 - protein, 10 aa, synthetic construct
NYFRGDRSVV

SEQ ID NO: 138565 - protein, 10 aa, synthetic construct
NYKRGDRSVV

SEQ ID NO: 138566 - protein, 10 aa, synthetic construct
NYRRGDRSVV

SEQ ID NO: 138567 - protein, 10 aa, synthetic construct
NYHRGDRSVV

SEQ ID NO: 138568 - protein, 10 aa, synthetic construct
NYSRGDRSVV

SEQ ID NO: 138569 - protein, 10 aa, synthetic construct
NYTRGDRSVV

SEQ ID NO: 138570 - protein, 10 aa, synthetic construct
NYYRGDRSVV

SEQ ID NO: 138571 - protein, 10 aa, synthetic construct
NYNRGDRSVV

SEQ ID NO: 138572 - protein, 10 aa, synthetic construct
NYQRGDRSVV

SEQ ID NO: 138573 - protein, 10 aa, synthetic construct
NYDRGDRSVV

SEQ ID NO: 138574 - protein, 10 aa, synthetic construct
NYERGDRSVV

SEQ ID NO: 138575 - protein, 10 aa, synthetic construct
NNGRGDRSVV

SEQ ID NO: 138576 - protein, 10 aa, synthetic construct
NNARGDRSVV

SEQ ID NO: 138577 - protein, 10 aa, synthetic construct
NNVRGDRSVV

SEQ ID NO: 138578 - protein, 10 aa, synthetic construct
NNPRGDRSVV

SEQ ID NO: 138579 - protein, 10 aa, synthetic construct
NNLRGDRSVV

SEQ ID NO: 138580 - protein, 10 aa, synthetic construct
NNIRGDRSVV

SEQ ID NO: 138581 - protein, 10 aa, synthetic construct
NNMRGDRSVV

SEQ ID NO: 138582 - protein, 10 aa, synthetic construct
NNWRGDRSVV

SEQ ID NO: 138583 - protein, 10 aa, synthetic construct
NNFRGDRSVV

SEQ ID NO: 138584 - protein, 10 aa, synthetic construct
NNKRGDRSVV

SEQ ID NO: 138585 - protein, 10 aa, synthetic construct
NNRRGDRSVV

SEQ ID NO: 138586 - protein, 10 aa, synthetic construct
NNHRGDRSVV

SEQ ID NO: 138587 - protein, 10 aa, synthetic construct
NNSRGDRSVV

SEQ ID NO: 138588 - protein, 10 aa, synthetic construct
NNTRGDRSVV

SEQ ID NO: 138589 - protein, 10 aa, synthetic construct
NNYRGDRSVV

SEQ ID NO: 138590 - protein, 10 aa, synthetic construct
NNNRGDRSVV

SEQ ID NO: 138591 - protein, 10 aa, synthetic construct
NNQRGDRSVV

SEQ ID NO: 138592 - protein, 10 aa, synthetic construct
NNDRGDRSVV

SEQ ID NO: 138593 - protein, 10 aa, synthetic construct
NNERGDRSVV

SEQ ID NO: 138594 - protein, 10 aa, synthetic construct
NQGRGDRSVV

SEQ ID NO: 138595 - protein, 10 aa, synthetic construct
NQARGDRSVV

SEQ ID NO: 138596 - protein, 10 aa, synthetic construct
NQVRGDRSVV

SEQ ID NO: 138597 - protein, 10 aa, synthetic construct
NQPRGDRSVV

SEQ ID NO: 138598 - protein, 10 aa, synthetic construct
NQLRGDRSVV

SEQ ID NO: 138599 - protein, 10 aa, synthetic construct
NQIRGDRSVV

SEQ ID NO: 138600 - protein, 10 aa, synthetic construct
NQMRGDRSVV

SEQ ID NO: 138601 - protein, 10 aa, synthetic construct
NQWRGDRSVV

SEQ ID NO: 138602 - protein, 10 aa, synthetic construct
NQFRGDRSVV

SEQ ID NO: 138603 - protein, 10 aa, synthetic construct
NQKRGDRSVV

SEQ ID NO: 138604 - protein, 10 aa, synthetic construct
NQRRGDRSVV

SEQ ID NO: 138605 - protein, 10 aa, synthetic construct
NQHRGDRSVV

SEQ ID NO: 138606 - protein, 10 aa, synthetic construct
NQSRGDRSVV

SEQ ID NO: 138607 - protein, 10 aa, synthetic construct
NQTRGDRSVV

SEQ ID NO: 138608 - protein, 10 aa, synthetic construct
NQYRGDRSVV

SEQ ID NO: 138609 - protein, 10 aa, synthetic construct
NQNRGDRSVV

SEQ ID NO: 138610 - protein, 10 aa, synthetic construct
NQQRGDRSVV

SEQ ID NO: 138611 - protein, 10 aa, synthetic construct
NQDRGDRSVV

SEQ ID NO: 138612 - protein, 10 aa, synthetic construct
NQERGDRSVV

SEQ ID NO: 138613 - protein, 10 aa, synthetic construct
NDGRGDRSVV

SEQ ID NO: 138614 - protein, 10 aa, synthetic construct
NDARGDRSVV

SEQ ID NO: 138615 - protein, 10 aa, synthetic construct
NDVRGDRSVV

SEQ ID NO: 138616 - protein, 10 aa, synthetic construct
NDPRGDRSVV

SEQ ID NO: 138617 - protein, 10 aa, synthetic construct
NDLRGDRSVV

SEQ ID NO: 138618 - protein, 10 aa, synthetic construct
NDIRGDRSVV

SEQ ID NO: 138619 - protein, 10 aa, synthetic construct
NDMRGDRSVV

SEQ ID NO: 138620 - protein, 10 aa, synthetic construct
NDWRGDRSVV

SEQ ID NO: 138621 - protein, 10 aa, synthetic construct
NDFRGDRSVV

SEQ ID NO: 138622 - protein, 10 aa, synthetic construct
NDKRGDRSVV

SEQ ID NO: 138623 - protein, 10 aa, synthetic construct
NDRRGDRSVV

SEQ ID NO: 138624 - protein, 10 aa, synthetic construct
NDHRGDRSVV

SEQ ID NO: 138625 - protein, 10 aa, synthetic construct
NDSRGDRSVV

SEQ ID NO: 138626 - protein, 10 aa, synthetic construct
NDTRGDRSVV

SEQ ID NO: 138627 - protein, 10 aa, synthetic construct
NDYRGDRSVV

SEQ ID NO: 138628 - protein, 10 aa, synthetic construct
NDNRGDRSVV

SEQ ID NO: 138629 - protein, 10 aa, synthetic construct
NDQRGDRSVV

SEQ ID NO: 138630 - protein, 10 aa, synthetic construct
NDDRGDRSVV

SEQ ID NO: 138631 - protein, 10 aa, synthetic construct
NDERGDRSVV

SEQ ID NO: 138632 - protein, 10 aa, synthetic construct
NEGRGDRSVV

SEQ ID NO: 138633 - protein, 10 aa, synthetic construct
NEARGDRSVV

SEQ ID NO: 138634 - protein, 10 aa, synthetic construct
NEVRGDRSVV

SEQ ID NO: 138635 - protein, 10 aa, synthetic construct
NEPRGDRSVV

SEQ ID NO: 138636 - protein, 10 aa, synthetic construct
NELRGDRSVV

SEQ ID NO: 138637 - protein, 10 aa, synthetic construct
NEIRGDRSVV

SEQ ID NO: 138638 - protein, 10 aa, synthetic construct
NEMRGDRSVV

SEQ ID NO: 138639 - protein, 10 aa, synthetic construct
NEWRGDRSVV

SEQ ID NO: 138640 - protein, 10 aa, synthetic construct
NEFRGDRSVV

SEQ ID NO: 138641 - protein, 10 aa, synthetic construct
NEKRGDRSVV

SEQ ID NO: 138642 - protein, 10 aa, synthetic construct
NERRGDRSVV

SEQ ID NO: 138643 - protein, 10 aa, synthetic construct
NEHRGDRSVV

SEQ ID NO: 138644 - protein, 10 aa, synthetic construct
NESRGDRSVV

SEQ ID NO: 138645 - protein, 10 aa, synthetic construct
NETRGDRSVV

SEQ ID NO: 138646 - protein, 10 aa, synthetic construct
NEYRGDRSVV

SEQ ID NO: 138647 - protein, 10 aa, synthetic construct
NENRGDRSVV

SEQ ID NO: 138648 - protein, 10 aa, synthetic construct
NEQRGDRSVV

SEQ ID NO: 138649 - protein, 10 aa, synthetic construct
NEDRGDRSVV

SEQ ID NO: 138650 - protein, 10 aa, synthetic construct
NEERGDRSVV

SEQ ID NO: 138651 - protein, 10 aa, synthetic construct
DGGRGDRSVV

SEQ ID NO: 138652 - protein, 10 aa, synthetic construct
DGARGDRSVV

SEQ ID NO: 138653 - protein, 10 aa, synthetic construct
DGVRGDRSVV

SEQ ID NO: 138654 - protein, 10 aa, synthetic construct
DGPRGDRSVV

SEQ ID NO: 138655 - protein, 10 aa, synthetic construct
DGLRGDRSVV

SEQ ID NO: 138656 - protein, 10 aa, synthetic construct
DGIRGDRSVV

SEQ ID NO: 138657 - protein, 10 aa, synthetic construct
DGMRGDRSVV

SEQ ID NO: 138658 - protein, 10 aa, synthetic construct
DGWRGDRSVV

SEQ ID NO: 138659 - protein, 10 aa, synthetic construct
DGFRGDRSVV

SEQ ID NO: 138660 - protein, 10 aa, synthetic construct
DGKRGDRSVV

SEQ ID NO: 138661 - protein, 10 aa, synthetic construct
DGRRGDRSVV

SEQ ID NO: 138662 - protein, 10 aa, synthetic construct
DGHRGDRSVV

SEQ ID NO: 138663 - protein, 10 aa, synthetic construct
DGSRGDRSVV

SEQ ID NO: 138664 - protein, 10 aa, synthetic construct
DGTRGDRSVV

SEQ ID NO: 138665 - protein, 10 aa, synthetic construct
DGYRGDRSVV

SEQ ID NO: 138666 - protein, 10 aa, synthetic construct
DGNRGDRSVV

SEQ ID NO: 138667 - protein, 10 aa, synthetic construct
DGQRGDRSVV

SEQ ID NO: 138668 - protein, 10 aa, synthetic construct
DGDRGDRSVV

SEQ ID NO: 138669 - protein, 10 aa, synthetic construct
DGERGDRSVV

SEQ ID NO: 138670 - protein, 10 aa, synthetic construct
DAGRGDRSVV

SEQ ID NO: 138671 - protein, 10 aa, synthetic construct
DAARGDRSVV

SEQ ID NO: 138672 - protein, 10 aa, synthetic construct
DAVRGDRSVV

SEQ ID NO: 138673 - protein, 10 aa, synthetic construct
DAPRGDRSVV

SEQ ID NO: 138674 - protein, 10 aa, synthetic construct
DALRGDRSVV

SEQ ID NO: 138675 - protein, 10 aa, synthetic construct
DAIRGDRSVV

SEQ ID NO: 138676 - protein, 10 aa, synthetic construct
DAMRGDRSVV

SEQ ID NO: 138677 - protein, 10 aa, synthetic construct
DAWRGDRSVV

SEQ ID NO: 138678 - protein, 10 aa, synthetic construct
DAFRGDRSVV

SEQ ID NO: 138679 - protein, 10 aa, synthetic construct
DAKRGDRSVV

SEQ ID NO: 138680 - protein, 10 aa, synthetic construct
DARRGDRSVV

SEQ ID NO: 138681 - protein, 10 aa, synthetic construct
DAHRGDRSVV

SEQ ID NO: 138682 - protein, 10 aa, synthetic construct
DASRGDRSVV

SEQ ID NO: 138683 - protein, 10 aa, synthetic construct
DATRGDRSVV

SEQ ID NO: 138684 - protein, 10 aa, synthetic construct
DAYRGDRSVV

SEQ ID NO: 138685 - protein, 10 aa, synthetic construct
DANRGDRSVV

SEQ ID NO: 138686 - protein, 10 aa, synthetic construct
DAQRGDRSVV

SEQ ID NO: 138687 - protein, 10 aa, synthetic construct
DADRGDRSVV

SEQ ID NO: 138688 - protein, 10 aa, synthetic construct
DAERGDRSVV

SEQ ID NO: 138689 - protein, 10 aa, synthetic construct
DVGRGDRSVV

SEQ ID NO: 138690 - protein, 10 aa, synthetic construct
DVARGDRSVV

SEQ ID NO: 138691 - protein, 10 aa, synthetic construct
DVVRGDRSVV

SEQ ID NO: 138692 - protein, 10 aa, synthetic construct
DVPRGDRSVV

SEQ ID NO: 138693 - protein, 10 aa, synthetic construct
DVLRGDRSVV

SEQ ID NO: 138694 - protein, 10 aa, synthetic construct
DVIRGDRSVV

SEQ ID NO: 138695 - protein, 10 aa, synthetic construct
DVMRGDRSVV

SEQ ID NO: 138696 - protein, 10 aa, synthetic construct
DVWRGDRSVV

SEQ ID NO: 138697 - protein, 10 aa, synthetic construct
DVFRGDRSVV

SEQ ID NO: 138698 - protein, 10 aa, synthetic construct
DVKRGDRSVV

SEQ ID NO: 138699 - protein, 10 aa, synthetic construct
DVRRGDRSVV

SEQ ID NO: 138700 - protein, 10 aa, synthetic construct
DVHRGDRSVV

SEQ ID NO: 138701 - protein, 10 aa, synthetic construct
DVSRGDRSVV

SEQ ID NO: 138702 - protein, 10 aa, synthetic construct
DVTRGDRSVV

SEQ ID NO: 138703 - protein, 10 aa, synthetic construct
DVYRGDRSVV

SEQ ID NO: 138704 - protein, 10 aa, synthetic construct
DVNRGDRSVV

SEQ ID NO: 138705 - protein, 10 aa, synthetic construct
DVQRGDRSVV

SEQ ID NO: 138706 - protein, 10 aa, synthetic construct
DVDRGDRSVV

SEQ ID NO: 138707 - protein, 10 aa, synthetic construct
DVERGDRSVV

SEQ ID NO: 138708 - protein, 10 aa, synthetic construct
DPGRGDRSVV

SEQ ID NO: 138709 - protein, 10 aa, synthetic construct
DPARGDRSVV

SEQ ID NO: 138710 - protein, 10 aa, synthetic construct
DPVRGDRSVV

SEQ ID NO: 138711 - protein, 10 aa, synthetic construct
DPPRGDRSVV

SEQ ID NO: 138712 - protein, 10 aa, synthetic construct
DPLRGDRSVV

SEQ ID NO: 138713 - protein, 10 aa, synthetic construct
DPIRGDRSVV

SEQ ID NO: 138714 - protein, 10 aa, synthetic construct
DPMRGDRSVV

SEQ ID NO: 138715 - protein, 10 aa, synthetic construct
DPWRGDRSVV

SEQ ID NO: 138716 - protein, 10 aa, synthetic construct
DPFRGDRSVV

SEQ ID NO: 138717 - protein, 10 aa, synthetic construct
DPKRGDRSVV

SEQ ID NO: 138718 - protein, 10 aa, synthetic construct
DPRRGDRSVV

SEQ ID NO: 138719 - protein, 10 aa, synthetic construct
DPHRGDRSVV

SEQ ID NO: 138720 - protein, 10 aa, synthetic construct
DPSRGDRSVV

SEQ ID NO: 138721 - protein, 10 aa, synthetic construct
DPTRGDRSVV

SEQ ID NO: 138722 - protein, 10 aa, synthetic construct
DPYRGDRSVV

SEQ ID NO: 138723 - protein, 10 aa, synthetic construct
DPNRGDRSVV

SEQ ID NO: 138724 - protein, 10 aa, synthetic construct
DPQRGDRSVV

SEQ ID NO: 138725 - protein, 10 aa, synthetic construct
DPDRGDRSVV

SEQ ID NO: 138726 - protein, 10 aa, synthetic construct
DPERGDRSVV

SEQ ID NO: 138727 - protein, 10 aa, synthetic construct
DLGRGDRSVV

SEQ ID NO: 138728 - protein, 10 aa, synthetic construct
DLARGDRSVV

SEQ ID NO: 138729 - protein, 10 aa, synthetic construct
DLVRGDRSVV

SEQ ID NO: 138730 - protein, 10 aa, synthetic construct
DLPRGDRSVV

SEQ ID NO: 138731 - protein, 10 aa, synthetic construct
DLLRGDRSVV

SEQ ID NO: 138732 - protein, 10 aa, synthetic construct
DLIRGDRSVV

SEQ ID NO: 138733 - protein, 10 aa, synthetic construct
DLMRGDRSVV

SEQ ID NO: 138734 - protein, 10 aa, synthetic construct
DLWRGDRSVV

SEQ ID NO: 138735 - protein, 10 aa, synthetic construct
DLFRGDRSVV

SEQ ID NO: 138736 - protein, 10 aa, synthetic construct
DLKRGDRSVV

SEQ ID NO: 138737 - protein, 10 aa, synthetic construct
DLRRGDRSVV

SEQ ID NO: 138738 - protein, 10 aa, synthetic construct
DLHRGDRSVV

SEQ ID NO: 138739 - protein, 10 aa, synthetic construct
DLSRGDRSVV

SEQ ID NO: 138740 - protein, 10 aa, synthetic construct
DLTRGDRSVV

SEQ ID NO: 138741 - protein, 10 aa, synthetic construct
DLYRGDRSVV

SEQ ID NO: 138742 - protein, 10 aa, synthetic construct
DLNRGDRSVV

SEQ ID NO: 138743 - protein, 10 aa, synthetic construct
DLQRGDRSVV

SEQ ID NO: 138744 - protein, 10 aa, synthetic construct
DLDRGDRSVV

SEQ ID NO: 138745 - protein, 10 aa, synthetic construct
DLERGDRSVV

SEQ ID NO: 138746 - protein, 10 aa, synthetic construct
DIGRGDRSVV

SEQ ID NO: 138747 - protein, 10 aa, synthetic construct
DIARGDRSVV

SEQ ID NO: 138748 - protein, 10 aa, synthetic construct
DIVRGDRSVV

SEQ ID NO: 138749 - protein, 10 aa, synthetic construct
DIPRGDRSVV

SEQ ID NO: 138750 - protein, 10 aa, synthetic construct
DILRGDRSVV

SEQ ID NO: 138751 - protein, 10 aa, synthetic construct
DIIRGDRSVV

SEQ ID NO: 138752 - protein, 10 aa, synthetic construct
DIMRGDRSVV

SEQ ID NO: 138753 - protein, 10 aa, synthetic construct
DIWRGDRSVV

SEQ ID NO: 138754 - protein, 10 aa, synthetic construct
DIFRGDRSVV

SEQ ID NO: 138755 - protein, 10 aa, synthetic construct
DIKRGDRSVV

SEQ ID NO: 138756 - protein, 10 aa, synthetic construct
DIRRGDRSVV

SEQ ID NO: 138757 - protein, 10 aa, synthetic construct
DIHRGDRSVV

SEQ ID NO: 138758 - protein, 10 aa, synthetic construct
DISRGDRSVV

SEQ ID NO: 138759 - protein, 10 aa, synthetic construct
DITRGDRSVV

SEQ ID NO: 138760 - protein, 10 aa, synthetic construct
DIYRGDRSVV

SEQ ID NO: 138761 - protein, 10 aa, synthetic construct
DINRGDRSVV

SEQ ID NO: 138762 - protein, 10 aa, synthetic construct
DIQRGDRSVV

SEQ ID NO: 138763 - protein, 10 aa, synthetic construct
DIDRGDRSVV

SEQ ID NO: 138764 - protein, 10 aa, synthetic construct
DIERGDRSVV

SEQ ID NO: 138765 - protein, 10 aa, synthetic construct
DMGRGDRSVV

SEQ ID NO: 138766 - protein, 10 aa, synthetic construct
DMARGDRSVV

SEQ ID NO: 138767 - protein, 10 aa, synthetic construct
DMVRGDRSVV

SEQ ID NO: 138768 - protein, 10 aa, synthetic construct
DMPRGDRSVV

SEQ ID NO: 138769 - protein, 10 aa, synthetic construct
DMLRGDRSVV

SEQ ID NO: 138770 - protein, 10 aa, synthetic construct
DMIRGDRSVV

SEQ ID NO: 138771 - protein, 10 aa, synthetic construct
DMMRGDRSVV

SEQ ID NO: 138772 - protein, 10 aa, synthetic construct
DMWRGDRSVV

SEQ ID NO: 138773 - protein, 10 aa, synthetic construct
DMFRGDRSVV

SEQ ID NO: 138774 - protein, 10 aa, synthetic construct
DMKRGDRSVV

SEQ ID NO: 138775 - protein, 10 aa, synthetic construct
DMRRGDRSVV

SEQ ID NO: 138776 - protein, 10 aa, synthetic construct
DMHRGDRSVV

SEQ ID NO: 138777 - protein, 10 aa, synthetic construct
DMSRGDRSVV

SEQ ID NO: 138778 - protein, 10 aa, synthetic construct
DMTRGDRSVV

SEQ ID NO: 138779 - protein, 10 aa, synthetic construct
DMYRGDRSVV

SEQ ID NO: 138780 - protein, 10 aa, synthetic construct
DMNRGDRSVV

SEQ ID NO: 138781 - protein, 10 aa, synthetic construct
DMQRGDRSVV

SEQ ID NO: 138782 - protein, 10 aa, synthetic construct
DMDRGDRSVV

SEQ ID NO: 138783 - protein, 10 aa, synthetic construct
DMERGDRSVV

SEQ ID NO: 138784 - protein, 10 aa, synthetic construct
DWGRGDRSVV

SEQ ID NO: 138785 - protein, 10 aa, synthetic construct
DWARGDRSVV

SEQ ID NO: 138786 - protein, 10 aa, synthetic construct
DWVRGDRSVV

SEQ ID NO: 138787 - protein, 10 aa, synthetic construct
DWPRGDRSVV

SEQ ID NO: 138788 - protein, 10 aa, synthetic construct
DWLRGDRSVV

SEQ ID NO: 138789 - protein, 10 aa, synthetic construct
DWIRGDRSVV

SEQ ID NO: 138790 - protein, 10 aa, synthetic construct
DWMRGDRSVV

SEQ ID NO: 138791 - protein, 10 aa, synthetic construct
DWWRGDRSVV

SEQ ID NO: 138792 - protein, 10 aa, synthetic construct
DWFRGDRSVV

SEQ ID NO: 138793 - protein, 10 aa, synthetic construct
DWKRGDRSVV

SEQ ID NO: 138794 - protein, 10 aa, synthetic construct
DWRRGDRSVV

SEQ ID NO: 138795 - protein, 10 aa, synthetic construct
DWHRGDRSVV

SEQ ID NO: 138796 - protein, 10 aa, synthetic construct
DWSRGDRSVV

SEQ ID NO: 138797 - protein, 10 aa, synthetic construct
DWTRGDRSVV

SEQ ID NO: 138798 - protein, 10 aa, synthetic construct
DWYRGDRSVV

SEQ ID NO: 138799 - protein, 10 aa, synthetic construct
DWNRGDRSVV

SEQ ID NO: 138800 - protein, 10 aa, synthetic construct
DWQRGDRSVV

SEQ ID NO: 138801 - protein, 10 aa, synthetic construct
DWDRGDRSVV

SEQ ID NO: 138802 - protein, 10 aa, synthetic construct
DWERGDRSVV

SEQ ID NO: 138803 - protein, 10 aa, synthetic construct
DFGRGDRSVV

SEQ ID NO: 138804 - protein, 10 aa, synthetic construct
DFARGDRSVV

SEQ ID NO: 138805 - protein, 10 aa, synthetic construct
DFVRGDRSVV

SEQ ID NO: 138806 - protein, 10 aa, synthetic construct
DFPRGDRSVV

SEQ ID NO: 138807 - protein, 10 aa, synthetic construct
DFLRGDRSVV

SEQ ID NO: 138808 - protein, 10 aa, synthetic construct
DFIRGDRSVV

SEQ ID NO: 138809 - protein, 10 aa, synthetic construct
DFMRGDRSVV

SEQ ID NO: 138810 - protein, 10 aa, synthetic construct
DFWRGDRSVV

SEQ ID NO: 138811 - protein, 10 aa, synthetic construct
DFFRGDRSVV

SEQ ID NO: 138812 - protein, 10 aa, synthetic construct
DFKRGDRSVV

SEQ ID NO: 138813 - protein, 10 aa, synthetic construct
DFRRGDRSVV

SEQ ID NO: 138814 - protein, 10 aa, synthetic construct
DFHRGDRSVV

SEQ ID NO: 138815 - protein, 10 aa, synthetic construct
DFSRGDRSVV

SEQ ID NO: 138816 - protein, 10 aa, synthetic construct
DFTRGDRSVV

SEQ ID NO: 138817 - protein, 10 aa, synthetic construct
DFYRGDRSVV

SEQ ID NO: 138818 - protein, 10 aa, synthetic construct
DFNRGDRSVV

SEQ ID NO: 138819 - protein, 10 aa, synthetic construct
DFQRGDRSVV

SEQ ID NO: 138820 - protein, 10 aa, synthetic construct
DFDRGDRSVV

SEQ ID NO: 138821 - protein, 10 aa, synthetic construct
DFERGDRSVV

SEQ ID NO: 138822 - protein, 10 aa, synthetic construct
DKGRGDRSVV

SEQ ID NO: 138823 - protein, 10 aa, synthetic construct
DKARGDRSVV

SEQ ID NO: 138824 - protein, 10 aa, synthetic construct
DKVRGDRSVV

SEQ ID NO: 138825 - protein, 10 aa, synthetic construct
DKPRGDRSVV

SEQ ID NO: 138826 - protein, 10 aa, synthetic construct
DKLRGDRSVV

SEQ ID NO: 138827 - protein, 10 aa, synthetic construct
DKIRGDRSVV

SEQ ID NO: 138828 - protein, 10 aa, synthetic construct
DKMRGDRSVV

SEQ ID NO: 138829 - protein, 10 aa, synthetic construct
DKWRGDRSVV

SEQ ID NO: 138830 - protein, 10 aa, synthetic construct
DKFRGDRSVV

SEQ ID NO: 138831 - protein, 10 aa, synthetic construct
DKKRGDRSVV

SEQ ID NO: 138832 - protein, 10 aa, synthetic construct
DKRRGDRSVV

SEQ ID NO: 138833 - protein, 10 aa, synthetic construct
DKHRGDRSVV

SEQ ID NO: 138834 - protein, 10 aa, synthetic construct
DKSRGDRSVV

SEQ ID NO: 138835 - protein, 10 aa, synthetic construct
DKTRGDRSVV

SEQ ID NO: 138836 - protein, 10 aa, synthetic construct
DKYRGDRSVV

SEQ ID NO: 138837 - protein, 10 aa, synthetic construct
DKNRGDRSVV

SEQ ID NO: 138838 - protein, 10 aa, synthetic construct
DKQRGDRSVV

SEQ ID NO: 138839 - protein, 10 aa, synthetic construct
DKDRGDRSVV

SEQ ID NO: 138840 - protein, 10 aa, synthetic construct
DKERGDRSVV

SEQ ID NO: 138841 - protein, 10 aa, synthetic construct
DRGRGDRSVV

SEQ ID NO: 138842 - protein, 10 aa, synthetic construct
DRARGDRSVV

SEQ ID NO: 138843 - protein, 10 aa, synthetic construct
DRVRGDRSVV

SEQ ID NO: 138844 - protein, 10 aa, synthetic construct
DRPRGDRSVV

SEQ ID NO: 138845 - protein, 10 aa, synthetic construct
DRLRGDRSVV

SEQ ID NO: 138846 - protein, 10 aa, synthetic construct
DRIRGDRSVV

SEQ ID NO: 138847 - protein, 10 aa, synthetic construct
DRMRGDRSVV

SEQ ID NO: 138848 - protein, 10 aa, synthetic construct
DRWRGDRSVV

SEQ ID NO: 138849 - protein, 10 aa, synthetic construct
DRFRGDRSVV

SEQ ID NO: 138850 - protein, 10 aa, synthetic construct
DRKRGDRSVV

SEQ ID NO: 138851 - protein, 10 aa, synthetic construct
DRRRGDRSVV

SEQ ID NO: 138852 - protein, 10 aa, synthetic construct
DRHRGDRSVV

SEQ ID NO: 138853 - protein, 10 aa, synthetic construct
DRSRGDRSVV

SEQ ID NO: 138854 - protein, 10 aa, synthetic construct
DRTRGDRSVV

SEQ ID NO: 138855 - protein, 10 aa, synthetic construct
DRYRGDRSVV

SEQ ID NO: 138856 - protein, 10 aa, synthetic construct
DRNRGDRSVV

SEQ ID NO: 138857 - protein, 10 aa, synthetic construct
DRQRGDRSVV

SEQ ID NO: 138858 - protein, 10 aa, synthetic construct
DRDRGDRSVV

SEQ ID NO: 138859 - protein, 10 aa, synthetic construct
DRERGDRSVV

SEQ ID NO: 138860 - protein, 10 aa, synthetic construct
DHGRGDRSVV

SEQ ID NO: 138861 - protein, 10 aa, synthetic construct
DHARGDRSVV

SEQ ID NO: 138862 - protein, 10 aa, synthetic construct
DHVRGDRSVV

SEQ ID NO: 138863 - protein, 10 aa, synthetic construct
DHPRGDRSVV

SEQ ID NO: 138864 - protein, 10 aa, synthetic construct
DHLRGDRSVV

SEQ ID NO: 138865 - protein, 10 aa, synthetic construct
DHIRGDRSVV

SEQ ID NO: 138866 - protein, 10 aa, synthetic construct
DHMRGDRSVV

SEQ ID NO: 138867 - protein, 10 aa, synthetic construct
DHWRGDRSVV

SEQ ID NO: 138868 - protein, 10 aa, synthetic construct
DHFRGDRSVV

SEQ ID NO: 138869 - protein, 10 aa, synthetic construct
DHKRGDRSVV

SEQ ID NO: 138870 - protein, 10 aa, synthetic construct
DHRRGDRSVV

SEQ ID NO: 138871 - protein, 10 aa, synthetic construct
DHHRGDRSVV

SEQ ID NO: 138872 - protein, 10 aa, synthetic construct
DHSRGDRSVV

SEQ ID NO: 138873 - protein, 10 aa, synthetic construct
DHTRGDRSVV

SEQ ID NO: 138874 - protein, 10 aa, synthetic construct
DHYRGDRSVV

SEQ ID NO: 138875 - protein, 10 aa, synthetic construct
DHNRGDRSVV

SEQ ID NO: 138876 - protein, 10 aa, synthetic construct
DHQRGDRSVV

SEQ ID NO: 138877 - protein, 10 aa, synthetic construct
DHDRGDRSVV

SEQ ID NO: 138878 - protein, 10 aa, synthetic construct
DHERGDRSVV

SEQ ID NO: 138879 - protein, 10 aa, synthetic construct
DSGRGDRSVV

SEQ ID NO: 138880 - protein, 10 aa, synthetic construct
DSARGDRSVV

SEQ ID NO: 138881 - protein, 10 aa, synthetic construct
DSVRGDRSVV

SEQ ID NO: 138882 - protein, 10 aa, synthetic construct
DSPRGDRSVV

SEQ ID NO: 138883 - protein, 10 aa, synthetic construct
DSLRGDRSVV

SEQ ID NO: 138884 - protein, 10 aa, synthetic construct
DSIRGDRSVV

SEQ ID NO: 138885 - protein, 10 aa, synthetic construct
DSMRGDRSVV

SEQ ID NO: 138886 - protein, 10 aa, synthetic construct
DSWRGDRSVV

SEQ ID NO: 138887 - protein, 10 aa, synthetic construct
DSFRGDRSVV

SEQ ID NO: 138888 - protein, 10 aa, synthetic construct
DSKRGDRSVV

SEQ ID NO: 138889 - protein, 10 aa, synthetic construct
DSRRGDRSVV

SEQ ID NO: 138890 - protein, 10 aa, synthetic construct
DSHRGDRSVV

SEQ ID NO: 138891 - protein, 10 aa, synthetic construct
DSSRGDRSVV

SEQ ID NO: 138892 - protein, 10 aa, synthetic construct
DSTRGDRSVV

SEQ ID NO: 138893 - protein, 10 aa, synthetic construct
DSYRGDRSVV

SEQ ID NO: 138894 - protein, 10 aa, synthetic construct
DSNRGDRSVV

SEQ ID NO: 138895 - protein, 10 aa, synthetic construct
DSQRGDRSVV

SEQ ID NO: 138896 - protein, 10 aa, synthetic construct
DSDRGDRSVV

SEQ ID NO: 138897 - protein, 10 aa, synthetic construct
DSERGDRSVV

SEQ ID NO: 138898 - protein, 10 aa, synthetic construct
DTGRGDRSVV

SEQ ID NO: 138899 - protein, 10 aa, synthetic construct
DTARGDRSVV

SEQ ID NO: 138900 - protein, 10 aa, synthetic construct
DTVRGDRSVV

SEQ ID NO: 138901 - protein, 10 aa, synthetic construct
DTPRGDRSVV

SEQ ID NO: 138902 - protein, 10 aa, synthetic construct
DTLRGDRSVV

SEQ ID NO: 138903 - protein, 10 aa, synthetic construct
DTIRGDRSVV

SEQ ID NO: 138904 - protein, 10 aa, synthetic construct
DTMRGDRSVV

SEQ ID NO: 138905 - protein, 10 aa, synthetic construct
DTWRGDRSVV

SEQ ID NO: 138906 - protein, 10 aa, synthetic construct
DTFRGDRSVV

SEQ ID NO: 138907 - protein, 10 aa, synthetic construct
DTKRGDRSVV

SEQ ID NO: 138908 - protein, 10 aa, synthetic construct
DTRRGDRSVV

SEQ ID NO: 138909 - protein, 10 aa, synthetic construct
DTHRGDRSVV

SEQ ID NO: 138910 - protein, 10 aa, synthetic construct
DTSRGDRSVV

SEQ ID NO: 138911 - protein, 10 aa, synthetic construct
DTTRGDRSVV

SEQ ID NO: 138912 - protein, 10 aa, synthetic construct
DTYRGDRSVV

SEQ ID NO: 138913 - protein, 10 aa, synthetic construct
DTNRGDRSVV

SEQ ID NO: 138914 - protein, 10 aa, synthetic construct
DTQRGDRSVV

SEQ ID NO: 138915 - protein, 10 aa, synthetic construct
DTDRGDRSVV

SEQ ID NO: 138916 - protein, 10 aa, synthetic construct
DTERGDRSVV

SEQ ID NO: 138917 - protein, 10 aa, synthetic construct
DYGRGDRSVV

SEQ ID NO: 138918 - protein, 10 aa, synthetic construct
DYARGDRSVV

SEQ ID NO: 138919 - protein, 10 aa, synthetic construct
DYVRGDRSVV

SEQ ID NO: 138920 - protein, 10 aa, synthetic construct
DYPRGDRSVV

SEQ ID NO: 138921 - protein, 10 aa, synthetic construct
DYLRGDRSVV

SEQ ID NO: 138922 - protein, 10 aa, synthetic construct
DYIRGDRSVV

SEQ ID NO: 138923 - protein, 10 aa, synthetic construct
DYMRGDRSVV

SEQ ID NO: 138924 - protein, 10 aa, synthetic construct
DYWRGDRSVV

SEQ ID NO: 138925 - protein, 10 aa, synthetic construct
DYFRGDRSVV

SEQ ID NO: 138926 - protein, 10 aa, synthetic construct
DYKRGDRSVV

SEQ ID NO: 138927 - protein, 10 aa, synthetic construct
DYRRGDRSVV

SEQ ID NO: 138928 - protein, 10 aa, synthetic construct
DYHRGDRSVV

SEQ ID NO: 138929 - protein, 10 aa, synthetic construct
DYSRGDRSVV

SEQ ID NO: 138930 - protein, 10 aa, synthetic construct
DYTRGDRSVV

SEQ ID NO: 138931 - protein, 10 aa, synthetic construct
DYYRGDRSVV

SEQ ID NO: 138932 - protein, 10 aa, synthetic construct
DYNRGDRSVV

SEQ ID NO: 138933 - protein, 10 aa, synthetic construct
DYQRGDRSVV

SEQ ID NO: 138934 - protein, 10 aa, synthetic construct
DYDRGDRSVV

SEQ ID NO: 138935 - protein, 10 aa, synthetic construct
DYERGDRSVV

SEQ ID NO: 138936 - protein, 10 aa, synthetic construct
DNGRGDRSVV

SEQ ID NO: 138937 - protein, 10 aa, synthetic construct
DNARGDRSVV

SEQ ID NO: 138938 - protein, 10 aa, synthetic construct
DNVRGDRSVV

SEQ ID NO: 138939 - protein, 10 aa, synthetic construct
DNPRGDRSVV

SEQ ID NO: 138940 - protein, 10 aa, synthetic construct
DNLRGDRSVV

SEQ ID NO: 138941 - protein, 10 aa, synthetic construct
DNIRGDRSVV

SEQ ID NO: 138942 - protein, 10 aa, synthetic construct
DNMRGDRSVV

SEQ ID NO: 138943 - protein, 10 aa, synthetic construct
DNWRGDRSVV

SEQ ID NO: 138944 - protein, 10 aa, synthetic construct
DNFRGDRSVV

SEQ ID NO: 138945 - protein, 10 aa, synthetic construct
DNKRGDRSVV

SEQ ID NO: 138946 - protein, 10 aa, synthetic construct
DNRRGDRSVV

SEQ ID NO: 138947 - protein, 10 aa, synthetic construct
DNHRGDRSVV

SEQ ID NO: 138948 - protein, 10 aa, synthetic construct
DNSRGDRSVV

SEQ ID NO: 138949 - protein, 10 aa, synthetic construct
DNTRGDRSVV

SEQ ID NO: 138950 - protein, 10 aa, synthetic construct
DNYRGDRSVV

SEQ ID NO: 138951 - protein, 10 aa, synthetic construct
DNNRGDRSVV

SEQ ID NO: 138952 - protein, 10 aa, synthetic construct
DNQRGDRSVV

SEQ ID NO: 138953 - protein, 10 aa, synthetic construct
DNDRGDRSVV

SEQ ID NO: 138954 - protein, 10 aa, synthetic construct
DNERGDRSVV

SEQ ID NO: 138955 - protein, 10 aa, synthetic construct
DQGRGDRSVV

SEQ ID NO: 138956 - protein, 10 aa, synthetic construct
DQARGDRSVV

SEQ ID NO: 138957 - protein, 10 aa, synthetic construct
DQVRGDRSVV

SEQ ID NO: 138958 - protein, 10 aa, synthetic construct
DQPRGDRSVV

SEQ ID NO: 138959 - protein, 10 aa, synthetic construct
DQLRGDRSVV

SEQ ID NO: 138960 - protein, 10 aa, synthetic construct
DQIRGDRSVV

SEQ ID NO: 138961 - protein, 10 aa, synthetic construct
DQMRGDRSVV

SEQ ID NO: 138962 - protein, 10 aa, synthetic construct
DQWRGDRSVV

SEQ ID NO: 138963 - protein, 10 aa, synthetic construct
DQFRGDRSVV

SEQ ID NO: 138964 - protein, 10 aa, synthetic construct
DQKRGDRSVV

SEQ ID NO: 138965 - protein, 10 aa, synthetic construct
DQRRGDRSVV

SEQ ID NO: 138966 - protein, 10 aa, synthetic construct
DQHRGDRSVV

SEQ ID NO: 138967 - protein, 10 aa, synthetic construct
DQSRGDRSVV

SEQ ID NO: 138968 - protein, 10 aa, synthetic construct
DQTRGDRSVV

SEQ ID NO: 138969 - protein, 10 aa, synthetic construct
DQYRGDRSVV

SEQ ID NO: 138970 - protein, 10 aa, synthetic construct
DQNRGDRSVV

SEQ ID NO: 138971 - protein, 10 aa, synthetic construct
DQQRGDRSVV

SEQ ID NO: 138972 - protein, 10 aa, synthetic construct
DQDRGDRSVV

SEQ ID NO: 138973 - protein, 10 aa, synthetic construct
DQERGDRSVV

SEQ ID NO: 138974 - protein, 10 aa, synthetic construct
DDGRGDRSVV

SEQ ID NO: 138975 - protein, 10 aa, synthetic construct
DDARGDRSVV

SEQ ID NO: 138976 - protein, 10 aa, synthetic construct
DDVRGDRSVV

SEQ ID NO: 138977 - protein, 10 aa, synthetic construct
DDPRGDRSVV

SEQ ID NO: 138978 - protein, 10 aa, synthetic construct
DDLRGDRSVV

SEQ ID NO: 138979 - protein, 10 aa, synthetic construct
DDIRGDRSVV

SEQ ID NO: 138980 - protein, 10 aa, synthetic construct
DDMRGDRSVV

SEQ ID NO: 138981 - protein, 10 aa, synthetic construct
DDWRGDRSVV

SEQ ID NO: 138982 - protein, 10 aa, synthetic construct
DDFRGDRSVV

SEQ ID NO: 138983 - protein, 10 aa, synthetic construct
DDKRGDRSVV

SEQ ID NO: 138984 - protein, 10 aa, synthetic construct
DDRRGDRSVV

SEQ ID NO: 138985 - protein, 10 aa, synthetic construct
DDHRGDRSVV

SEQ ID NO: 138986 - protein, 10 aa, synthetic construct
DDSRGDRSVV

SEQ ID NO: 138987 - protein, 10 aa, synthetic construct
DDTRGDRSVV

SEQ ID NO: 138988 - protein, 10 aa, synthetic construct
DDYRGDRSVV

SEQ ID NO: 138989 - protein, 10 aa, synthetic construct
DDNRGDRSVV

SEQ ID NO: 138990 - protein, 10 aa, synthetic construct
DDQRGDRSVV

SEQ ID NO: 138991 - protein, 10 aa, synthetic construct
DDDRGDRSVV

SEQ ID NO: 138992 - protein, 10 aa, synthetic construct
DDERGDRSVV

SEQ ID NO: 138993 - protein, 10 aa, synthetic construct
DEGRGDRSVV

SEQ ID NO: 138994 - protein, 10 aa, synthetic construct
DEARGDRSVV

SEQ ID NO: 138995 - protein, 10 aa, synthetic construct
DEVRGDRSVV

SEQ ID NO: 138996 - protein, 10 aa, synthetic construct
DEPRGDRSVV

SEQ ID NO: 138997 - protein, 10 aa, synthetic construct
DELRGDRSVV

SEQ ID NO: 138998 - protein, 10 aa, synthetic construct
DEIRGDRSVV

SEQ ID NO: 138999 - protein, 10 aa, synthetic construct
DEMRGDRSVV

SEQ ID NO: 139000 - protein, 10 aa, synthetic construct
DEWRGDRSVV

SEQ ID NO: 139001 - protein, 10 aa, synthetic construct
DEFRGDRSVV

SEQ ID NO: 139002 - protein, 10 aa, synthetic construct
DEKRGDRSVV

SEQ ID NO: 139003 - protein, 10 aa, synthetic construct
DERRGDRSVV

SEQ ID NO: 139004 - protein, 10 aa, synthetic construct
DEHRGDRSVV

SEQ ID NO: 139005 - protein, 10 aa, synthetic construct
DESRGDRSVV

SEQ ID NO: 139006 - protein, 10 aa, synthetic construct
DETRGDRSVV

SEQ ID NO: 139007 - protein, 10 aa, synthetic construct
DEYRGDRSVV

SEQ ID NO: 139008 - protein, 10 aa, synthetic construct
DENRGDRSVV

SEQ ID NO: 139009 - protein, 10 aa, synthetic construct
DEQRGDRSVV

SEQ ID NO: 139010 - protein, 10 aa, synthetic construct
DEDRGDRSVV

SEQ ID NO: 139011 - protein, 10 aa, synthetic construct
DEERGDRSVV

SEQ ID NO: 139012 - protein, 10 aa, synthetic construct
QGGRGDRSVV

SEQ ID NO: 139013 - protein, 10 aa, synthetic construct
QGARGDRSVV

SEQ ID NO: 139014 - protein, 10 aa, synthetic construct
QGVRGDRSVV

SEQ ID NO: 139015 - protein, 10 aa, synthetic construct
QGPRGDRSVV

SEQ ID NO: 139016 - protein, 10 aa, synthetic construct
QGLRGDRSVV

SEQ ID NO: 139017 - protein, 10 aa, synthetic construct
QGIRGDRSVV

SEQ ID NO: 139018 - protein, 10 aa, synthetic construct
QGMRGDRSVV

SEQ ID NO: 139019 - protein, 10 aa, synthetic construct
QGWRGDRSVV

SEQ ID NO: 139020 - protein, 10 aa, synthetic construct
QGFRGDRSVV

SEQ ID NO: 139021 - protein, 10 aa, synthetic construct
QGKRGDRSVV

SEQ ID NO: 139022 - protein, 10 aa, synthetic construct
QGRRGDRSVV

SEQ ID NO: 139023 - protein, 10 aa, synthetic construct
QGHRGDRSVV

SEQ ID NO: 139024 - protein, 10 aa, synthetic construct
QGSRGDRSVV

SEQ ID NO: 139025 - protein, 10 aa, synthetic construct
QGTRGDRSVV

SEQ ID NO: 139026 - protein, 10 aa, synthetic construct
QGYRGDRSVV

SEQ ID NO: 139027 - protein, 10 aa, synthetic construct
QGNRGDRSVV

SEQ ID NO: 139028 - protein, 10 aa, synthetic construct
QGQRGDRSVV

SEQ ID NO: 139029 - protein, 10 aa, synthetic construct
QGDRGDRSVV

SEQ ID NO: 139030 - protein, 10 aa, synthetic construct
QGERGDRSVV

SEQ ID NO: 139031 - protein, 10 aa, synthetic construct
QAGRGDRSVV

SEQ ID NO: 139032 - protein, 10 aa, synthetic construct
QAARGDRSVV

SEQ ID NO: 139033 - protein, 10 aa, synthetic construct
QAVRGDRSVV

SEQ ID NO: 139034 - protein, 10 aa, synthetic construct
QAPRGDRSVV

SEQ ID NO: 139035 - protein, 10 aa, synthetic construct
QALRGDRSVV

SEQ ID NO: 139036 - protein, 10 aa, synthetic construct
QAIRGDRSVV

SEQ ID NO: 139037 - protein, 10 aa, synthetic construct
QAMRGDRSVV

SEQ ID NO: 139038 - protein, 10 aa, synthetic construct
QAWRGDRSVV

SEQ ID NO: 139039 - protein, 10 aa, synthetic construct
QAFRGDRSVV

SEQ ID NO: 139040 - protein, 10 aa, synthetic construct
QAKRGDRSVV

SEQ ID NO: 139041 - protein, 10 aa, synthetic construct
QARRGDRSVV

SEQ ID NO: 139042 - protein, 10 aa, synthetic construct
QAHRGDRSVV

SEQ ID NO: 139043 - protein, 10 aa, synthetic construct
QASRGDRSVV

SEQ ID NO: 139044 - protein, 10 aa, synthetic construct
QATRGDRSVV

SEQ ID NO: 139045 - protein, 10 aa, synthetic construct
QAYRGDRSVV

SEQ ID NO: 139046 - protein, 10 aa, synthetic construct
QANRGDRSVV

SEQ ID NO: 139047 - protein, 10 aa, synthetic construct
QAQRGDRSVV

SEQ ID NO: 139048 - protein, 10 aa, synthetic construct
QADRGDRSVV

SEQ ID NO: 139049 - protein, 10 aa, synthetic construct
QAERGDRSVV

SEQ ID NO: 139050 - protein, 10 aa, synthetic construct
QVGRGDRSVV

SEQ ID NO: 139051 - protein, 10 aa, synthetic construct
QVARGDRSVV

SEQ ID NO: 139052 - protein, 10 aa, synthetic construct
QVVRGDRSVV

SEQ ID NO: 139053 - protein, 10 aa, synthetic construct
QVPRGDRSVV

SEQ ID NO: 139054 - protein, 10 aa, synthetic construct
QVLRGDRSVV

SEQ ID NO: 139055 - protein, 10 aa, synthetic construct
QVIRGDRSVV

SEQ ID NO: 139056 - protein, 10 aa, synthetic construct
QVMRGDRSVV

SEQ ID NO: 139057 - protein, 10 aa, synthetic construct
QVWRGDRSVV

SEQ ID NO: 139058 - protein, 10 aa, synthetic construct
QVFRGDRSVV

SEQ ID NO: 139059 - protein, 10 aa, synthetic construct
QVKRGDRSVV

SEQ ID NO: 139060 - protein, 10 aa, synthetic construct
QVRRGDRSVV

SEQ ID NO: 139061 - protein, 10 aa, synthetic construct
QVHRGDRSVV

SEQ ID NO: 139062 - protein, 10 aa, synthetic construct
QVSRGDRSVV

SEQ ID NO: 139063 - protein, 10 aa, synthetic construct
QVTRGDRSVV

SEQ ID NO: 139064 - protein, 10 aa, synthetic construct
QVYRGDRSVV

SEQ ID NO: 139065 - protein, 10 aa, synthetic construct
QVNRGDRSVV

SEQ ID NO: 139066 - protein, 10 aa, synthetic construct
QVQRGDRSVV

SEQ ID NO: 139067 - protein, 10 aa, synthetic construct
QVDRGDRSVV

SEQ ID NO: 139068 - protein, 10 aa, synthetic construct
QVERGDRSVV

SEQ ID NO: 139069 - protein, 10 aa, synthetic construct
QPGRGDRSVV

SEQ ID NO: 139070 - protein, 10 aa, synthetic construct
QPARGDRSVV

SEQ ID NO: 139071 - protein, 10 aa, synthetic construct
QPVRGDRSVV

SEQ ID NO: 139072 - protein, 10 aa, synthetic construct
QPPRGDRSVV

SEQ ID NO: 139073 - protein, 10 aa, synthetic construct
QPLRGDRSVV

SEQ ID NO: 139074 - protein, 10 aa, synthetic construct
QPIRGDRSVV

SEQ ID NO: 139075 - protein, 10 aa, synthetic construct
QPMRGDRSVV

SEQ ID NO: 139076 - protein, 10 aa, synthetic construct
QPWRGDRSVV

SEQ ID NO: 139077 - protein, 10 aa, synthetic construct
QPFRGDRSVV

SEQ ID NO: 139078 - protein, 10 aa, synthetic construct
QPKRGDRSVV

SEQ ID NO: 139079 - protein, 10 aa, synthetic construct
QPRRGDRSVV

SEQ ID NO: 139080 - protein, 10 aa, synthetic construct
QPHRGDRSVV

SEQ ID NO: 139081 - protein, 10 aa, synthetic construct
QPSRGDRSVV

SEQ ID NO: 139082 - protein, 10 aa, synthetic construct
QPTRGDRSVV

SEQ ID NO: 139083 - protein, 10 aa, synthetic construct
QPYRGDRSVV

SEQ ID NO: 139084 - protein, 10 aa, synthetic construct
QPNRGDRSVV

SEQ ID NO: 139085 - protein, 10 aa, synthetic construct
QPQRGDRSVV

SEQ ID NO: 139086 - protein, 10 aa, synthetic construct
QPDRGDRSVV

SEQ ID NO: 139087 - protein, 10 aa, synthetic construct
QPERGDRSVV

SEQ ID NO: 139088 - protein, 10 aa, synthetic construct
QLGRGDRSVV

SEQ ID NO: 139089 - protein, 10 aa, synthetic construct
QLARGDRSVV

SEQ ID NO: 139090 - protein, 10 aa, synthetic construct
QLVRGDRSVV

SEQ ID NO: 139091 - protein, 10 aa, synthetic construct
QLPRGDRSVV

SEQ ID NO: 139092 - protein, 10 aa, synthetic construct
QLLRGDRSVV

SEQ ID NO: 139093 - protein, 10 aa, synthetic construct
QLIRGDRSVV

SEQ ID NO: 139094 - protein, 10 aa, synthetic construct
QLMRGDRSVV

SEQ ID NO: 139095 - protein, 10 aa, synthetic construct
QLWRGDRSVV

SEQ ID NO: 139096 - protein, 10 aa, synthetic construct
QLFRGDRSVV

SEQ ID NO: 139097 - protein, 10 aa, synthetic construct
QLKRGDRSVV

SEQ ID NO: 139098 - protein, 10 aa, synthetic construct
QLRRGDRSVV

SEQ ID NO: 139099 - protein, 10 aa, synthetic construct
QLHRGDRSVV

SEQ ID NO: 139100 - protein, 10 aa, synthetic construct
QLSRGDRSVV

SEQ ID NO: 139101 - protein, 10 aa, synthetic construct
QLTRGDRSVV

SEQ ID NO: 139102 - protein, 10 aa, synthetic construct
QLYRGDRSVV

SEQ ID NO: 139103 - protein, 10 aa, synthetic construct
QLNRGDRSVV

SEQ ID NO: 139104 - protein, 10 aa, synthetic construct
QLQRGDRSVV

SEQ ID NO: 139105 - protein, 10 aa, synthetic construct
QLDRGDRSVV

SEQ ID NO: 139106 - protein, 10 aa, synthetic construct
QLERGDRSVV

SEQ ID NO: 139107 - protein, 10 aa, synthetic construct
QIGRGDRSVV

SEQ ID NO: 139108 - protein, 10 aa, synthetic construct
QIARGDRSVV

SEQ ID NO: 139109 - protein, 10 aa, synthetic construct
QIVRGDRSVV

SEQ ID NO: 139110 - protein, 10 aa, synthetic construct
QIPRGDRSVV

SEQ ID NO: 139111 - protein, 10 aa, synthetic construct
QILRGDRSVV

SEQ ID NO: 139112 - protein, 10 aa, synthetic construct
QIIRGDRSVV

SEQ ID NO: 139113 - protein, 10 aa, synthetic construct
QIMRGDRSVV

SEQ ID NO: 139114 - protein, 10 aa, synthetic construct
QIWRGDRSVV

SEQ ID NO: 139115 - protein, 10 aa, synthetic construct
QIFRGDRSVV

SEQ ID NO: 139116 - protein, 10 aa, synthetic construct
QIKRGDRSVV

SEQ ID NO: 139117 - protein, 10 aa, synthetic construct
QIRRGDRSVV

SEQ ID NO: 139118 - protein, 10 aa, synthetic construct
QIHRGDRSVV

SEQ ID NO: 139119 - protein, 10 aa, synthetic construct
QISRGDRSVV

SEQ ID NO: 139120 - protein, 10 aa, synthetic construct
QITRGDRSVV

SEQ ID NO: 139121 - protein, 10 aa, synthetic construct
QIYRGDRSVV

SEQ ID NO: 139122 - protein, 10 aa, synthetic construct
QINRGDRSVV

SEQ ID NO: 139123 - protein, 10 aa, synthetic construct
QIQRGDRSVV

SEQ ID NO: 139124 - protein, 10 aa, synthetic construct
QIDRGDRSVV

SEQ ID NO: 139125 - protein, 10 aa, synthetic construct
QIERGDRSVV

SEQ ID NO: 139126 - protein, 10 aa, synthetic construct
QMGRGDRSVV

SEQ ID NO: 139127 - protein, 10 aa, synthetic construct
QMARGDRSVV

SEQ ID NO: 139128 - protein, 10 aa, synthetic construct
QMVRGDRSVV

SEQ ID NO: 139129 - protein, 10 aa, synthetic construct
QMPRGDRSVV

SEQ ID NO: 139130 - protein, 10 aa, synthetic construct
QMLRGDRSVV

SEQ ID NO: 139131 - protein, 10 aa, synthetic construct
QMIRGDRSVV

SEQ ID NO: 139132 - protein, 10 aa, synthetic construct
QMMRGDRSVV

SEQ ID NO: 139133 - protein, 10 aa, synthetic construct
QMWRGDRSVV

SEQ ID NO: 139134 - protein, 10 aa, synthetic construct
QMFRGDRSVV

SEQ ID NO: 139135 - protein, 10 aa, synthetic construct
QMKRGDRSVV

SEQ ID NO: 139136 - protein, 10 aa, synthetic construct
QMRRGDRSVV

SEQ ID NO: 139137 - protein, 10 aa, synthetic construct
QMHRGDRSVV

SEQ ID NO: 139138 - protein, 10 aa, synthetic construct
QMSRGDRSVV

SEQ ID NO: 139139 - protein, 10 aa, synthetic construct
QMTRGDRSVV

SEQ ID NO: 139140 - protein, 10 aa, synthetic construct
QMYRGDRSVV

SEQ ID NO: 139141 - protein, 10 aa, synthetic construct
QMNRGDRSVV

SEQ ID NO: 139142 - protein, 10 aa, synthetic construct
QMQRGDRSVV

SEQ ID NO: 139143 - protein, 10 aa, synthetic construct
QMDRGDRSVV

SEQ ID NO: 139144 - protein, 10 aa, synthetic construct
QMERGDRSVV

SEQ ID NO: 139145 - protein, 10 aa, synthetic construct
QWGRGDRSVV

SEQ ID NO: 139146 - protein, 10 aa, synthetic construct
QWARGDRSVV

SEQ ID NO: 139147 - protein, 10 aa, synthetic construct
QWVRGDRSVV

SEQ ID NO: 139148 - protein, 10 aa, synthetic construct
QWPRGDRSVV

SEQ ID NO: 139149 - protein, 10 aa, synthetic construct
QWLRGDRSVV

SEQ ID NO: 139150 - protein, 10 aa, synthetic construct
QWIRGDRSVV

SEQ ID NO: 139151 - protein, 10 aa, synthetic construct
QWMRGDRSVV

SEQ ID NO: 139152 - protein, 10 aa, synthetic construct
QWWRGDRSVV

SEQ ID NO: 139153 - protein, 10 aa, synthetic construct
QWFRGDRSVV

SEQ ID NO: 139154 - protein, 10 aa, synthetic construct
QWKRGDRSVV

SEQ ID NO: 139155 - protein, 10 aa, synthetic construct
QWRRGDRSVV

SEQ ID NO: 139156 - protein, 10 aa, synthetic construct
QWHRGDRSVV

SEQ ID NO: 139157 - protein, 10 aa, synthetic construct
QWSRGDRSVV

SEQ ID NO: 139158 - protein, 10 aa, synthetic construct
QWTRGDRSVV

SEQ ID NO: 139159 - protein, 10 aa, synthetic construct
QWYRGDRSVV

SEQ ID NO: 139160 - protein, 10 aa, synthetic construct
QWNRGDRSVV

SEQ ID NO: 139161 - protein, 10 aa, synthetic construct
QWQRGDRSVV

SEQ ID NO: 139162 - protein, 10 aa, synthetic construct
QWDRGDRSVV

SEQ ID NO: 139163 - protein, 10 aa, synthetic construct
QWERGDRSVV

SEQ ID NO: 139164 - protein, 10 aa, synthetic construct
QFGRGDRSVV

SEQ ID NO: 139165 - protein, 10 aa, synthetic construct
QFARGDRSVV

SEQ ID NO: 139166 - protein, 10 aa, synthetic construct
QFVRGDRSVV

SEQ ID NO: 139167 - protein, 10 aa, synthetic construct
QFPRGDRSVV

SEQ ID NO: 139168 - protein, 10 aa, synthetic construct
QFLRGDRSVV

SEQ ID NO: 139169 - protein, 10 aa, synthetic construct
QFIRGDRSVV

SEQ ID NO: 139170 - protein, 10 aa, synthetic construct
QFMRGDRSVV

SEQ ID NO: 139171 - protein, 10 aa, synthetic construct
QFWRGDRSVV

SEQ ID NO: 139172 - protein, 10 aa, synthetic construct
QFFRGDRSVV

SEQ ID NO: 139173 - protein, 10 aa, synthetic construct
QFKRGDRSVV

SEQ ID NO: 139174 - protein, 10 aa, synthetic construct
QFRRGDRSVV

SEQ ID NO: 139175 - protein, 10 aa, synthetic construct
QFHRGDRSVV

SEQ ID NO: 139176 - protein, 10 aa, synthetic construct
QFSRGDRSVV

SEQ ID NO: 139177 - protein, 10 aa, synthetic construct
QFTRGDRSVV

SEQ ID NO: 139178 - protein, 10 aa, synthetic construct
QFYRGDRSVV

SEQ ID NO: 139179 - protein, 10 aa, synthetic construct
QFNRGDRSVV

SEQ ID NO: 139180 - protein, 10 aa, synthetic construct
QFQRGDRSVV

SEQ ID NO: 139181 - protein, 10 aa, synthetic construct
QFDRGDRSVV

SEQ ID NO: 139182 - protein, 10 aa, synthetic construct
QFERGDRSVV

SEQ ID NO: 139183 - protein, 10 aa, synthetic construct
QKGRGDRSVV

SEQ ID NO: 139184 - protein, 10 aa, synthetic construct
QKARGDRSVV

SEQ ID NO: 139185 - protein, 10 aa, synthetic construct
QKVRGDRSVV

SEQ ID NO: 139186 - protein, 10 aa, synthetic construct
QKPRGDRSVV

SEQ ID NO: 139187 - protein, 10 aa, synthetic construct
QKLRGDRSVV

SEQ ID NO: 139188 - protein, 10 aa, synthetic construct
QKIRGDRSVV

SEQ ID NO: 139189 - protein, 10 aa, synthetic construct
QKMRGDRSVV

SEQ ID NO: 139190 - protein, 10 aa, synthetic construct
QKWRGDRSVV

SEQ ID NO: 139191 - protein, 10 aa, synthetic construct
QKFRGDRSVV

SEQ ID NO: 139192 - protein, 10 aa, synthetic construct
QKKRGDRSVV

SEQ ID NO: 139193 - protein, 10 aa, synthetic construct
QKRRGDRSVV

SEQ ID NO: 139194 - protein, 10 aa, synthetic construct
QKHRGDRSVV

SEQ ID NO: 139195 - protein, 10 aa, synthetic construct
QKSRGDRSVV

SEQ ID NO: 139196 - protein, 10 aa, synthetic construct
QKTRGDRSVV

SEQ ID NO: 139197 - protein, 10 aa, synthetic construct
QKYRGDRSVV

SEQ ID NO: 139198 - protein, 10 aa, synthetic construct
QKNRGDRSVV

SEQ ID NO: 139199 - protein, 10 aa, synthetic construct
QKQRGDRSVV

SEQ ID NO: 139200 - protein, 10 aa, synthetic construct
QKDRGDRSVV

SEQ ID NO: 139201 - protein, 10 aa, synthetic construct
QKERGDRSVV

SEQ ID NO: 139202 - protein, 10 aa, synthetic construct
QRGRGDRSVV

SEQ ID NO: 139203 - protein, 10 aa, synthetic construct
QRARGDRSVV

SEQ ID NO: 139204 - protein, 10 aa, synthetic construct
QRVRGDRSVV

SEQ ID NO: 139205 - protein, 10 aa, synthetic construct
QRPRGDRSVV

SEQ ID NO: 139206 - protein, 10 aa, synthetic construct
QRLRGDRSVV

SEQ ID NO: 139207 - protein, 10 aa, synthetic construct
QRIRGDRSVV

SEQ ID NO: 139208 - protein, 10 aa, synthetic construct
QRMRGDRSVV

SEQ ID NO: 139209 - protein, 10 aa, synthetic construct
QRWRGDRSVV

SEQ ID NO: 139210 - protein, 10 aa, synthetic construct
QRFRGDRSVV

SEQ ID NO: 139211 - protein, 10 aa, synthetic construct
QRKRGDRSVV

SEQ ID NO: 139212 - protein, 10 aa, synthetic construct
QRRRGDRSVV

SEQ ID NO: 139213 - protein, 10 aa, synthetic construct
QRHRGDRSVV

SEQ ID NO: 139214 - protein, 10 aa, synthetic construct
QRSRGDRSVV

SEQ ID NO: 139215 - protein, 10 aa, synthetic construct
QRTRGDRSVV

SEQ ID NO: 139216 - protein, 10 aa, synthetic construct
QRYRGDRSVV

SEQ ID NO: 139217 - protein, 10 aa, synthetic construct
QRNRGDRSVV

SEQ ID NO: 139218 - protein, 10 aa, synthetic construct
QRQRGDRSVV

SEQ ID NO: 139219 - protein, 10 aa, synthetic construct
QRDRGDRSVV

SEQ ID NO: 139220 - protein, 10 aa, synthetic construct
QRERGDRSVV

SEQ ID NO: 139221 - protein, 10 aa, synthetic construct
QHGRGDRSVV

SEQ ID NO: 139222 - protein, 10 aa, synthetic construct
QHARGDRSVV

SEQ ID NO: 139223 - protein, 10 aa, synthetic construct
QHVRGDRSVV

SEQ ID NO: 139224 - protein, 10 aa, synthetic construct
QHPRGDRSVV

SEQ ID NO: 139225 - protein, 10 aa, synthetic construct
QHLRGDRSVV

SEQ ID NO: 139226 - protein, 10 aa, synthetic construct
QHIRGDRSVV

SEQ ID NO: 139227 - protein, 10 aa, synthetic construct
QHMRGDRSVV

SEQ ID NO: 139228 - protein, 10 aa, synthetic construct
QHWRGDRSVV

SEQ ID NO: 139229 - protein, 10 aa, synthetic construct
QHFRGDRSVV

SEQ ID NO: 139230 - protein, 10 aa, synthetic construct
QHKRGDRSVV

SEQ ID NO: 139231 - protein, 10 aa, synthetic construct
QHRRGDRSVV

SEQ ID NO: 139232 - protein, 10 aa, synthetic construct
QHHRGDRSVV

SEQ ID NO: 139233 - protein, 10 aa, synthetic construct
QHSRGDRSVV

SEQ ID NO: 139234 - protein, 10 aa, synthetic construct
QHTRGDRSVV

SEQ ID NO: 139235 - protein, 10 aa, synthetic construct
QHYRGDRSVV

SEQ ID NO: 139236 - protein, 10 aa, synthetic construct
QHNRGDRSVV

SEQ ID NO: 139237 - protein, 10 aa, synthetic construct
QHQRGDRSVV

SEQ ID NO: 139238 - protein, 10 aa, synthetic construct
QHDRGDRSVV

SEQ ID NO: 139239 - protein, 10 aa, synthetic construct
QHERGDRSVV

SEQ ID NO: 139240 - protein, 10 aa, synthetic construct
QSGRGDRSVV

SEQ ID NO: 139241 - protein, 10 aa, synthetic construct
QSARGDRSVV

SEQ ID NO: 139242 - protein, 10 aa, synthetic construct
QSVRGDRSVV

SEQ ID NO: 139243 - protein, 10 aa, synthetic construct
QSPRGDRSVV

SEQ ID NO: 139244 - protein, 10 aa, synthetic construct
QSLRGDRSVV

SEQ ID NO: 139245 - protein, 10 aa, synthetic construct
QSIRGDRSVV

SEQ ID NO: 139246 - protein, 10 aa, synthetic construct
QSMRGDRSVV

SEQ ID NO: 139247 - protein, 10 aa, synthetic construct
QSWRGDRSVV

SEQ ID NO: 139248 - protein, 10 aa, synthetic construct
QSFRGDRSVV

SEQ ID NO: 139249 - protein, 10 aa, synthetic construct
QSKRGDRSVV

SEQ ID NO: 139250 - protein, 10 aa, synthetic construct
QSRRGDRSVV

SEQ ID NO: 139251 - protein, 10 aa, synthetic construct
QSHRGDRSVV

SEQ ID NO: 139252 - protein, 10 aa, synthetic construct
QSSRGDRSVV

SEQ ID NO: 139253 - protein, 10 aa, synthetic construct
QSTRGDRSVV

SEQ ID NO: 139254 - protein, 10 aa, synthetic construct
QSYRGDRSVV

SEQ ID NO: 139255 - protein, 10 aa, synthetic construct
QSNRGDRSVV

SEQ ID NO: 139256 - protein, 10 aa, synthetic construct
QSQRGDRSVV

SEQ ID NO: 139257 - protein, 10 aa, synthetic construct
QSDRGDRSVV

SEQ ID NO: 139258 - protein, 10 aa, synthetic construct
QSERGDRSVV

SEQ ID NO: 139259 - protein, 10 aa, synthetic construct
QTGRGDRSVV

SEQ ID NO: 139260 - protein, 10 aa, synthetic construct
QTARGDRSVV

SEQ ID NO: 139261 - protein, 10 aa, synthetic construct
QTVRGDRSVV

SEQ ID NO: 139262 - protein, 10 aa, synthetic construct
QTPRGDRSVV

SEQ ID NO: 139263 - protein, 10 aa, synthetic construct
QTLRGDRSVV

SEQ ID NO: 139264 - protein, 10 aa, synthetic construct
QTIRGDRSVV

SEQ ID NO: 139265 - protein, 10 aa, synthetic construct
QTMRGDRSVV

SEQ ID NO: 139266 - protein, 10 aa, synthetic construct
QTWRGDRSVV

SEQ ID NO: 139267 - protein, 10 aa, synthetic construct
QTFRGDRSVV

SEQ ID NO: 139268 - protein, 10 aa, synthetic construct
QTKRGDRSVV

SEQ ID NO: 139269 - protein, 10 aa, synthetic construct
QTRRGDRSVV

SEQ ID NO: 139270 - protein, 10 aa, synthetic construct
QTHRGDRSVV

SEQ ID NO: 139271 - protein, 10 aa, synthetic construct
QTSRGDRSVV

SEQ ID NO: 139272 - protein, 10 aa, synthetic construct
QTTRGDRSVV

SEQ ID NO: 139273 - protein, 10 aa, synthetic construct
QTYRGDRSVV

SEQ ID NO: 139274 - protein, 10 aa, synthetic construct
QTNRGDRSVV

SEQ ID NO: 139275 - protein, 10 aa, synthetic construct
QTQRGDRSVV

SEQ ID NO: 139276 - protein, 10 aa, synthetic construct
QTDRGDRSVV

SEQ ID NO: 139277 - protein, 10 aa, synthetic construct
QTERGDRSVV

SEQ ID NO: 139278 - protein, 10 aa, synthetic construct
QYGRGDRSVV

SEQ ID NO: 139279 - protein, 10 aa, synthetic construct
QYARGDRSVV

SEQ ID NO: 139280 - protein, 10 aa, synthetic construct
QYVRGDRSVV

SEQ ID NO: 139281 - protein, 10 aa, synthetic construct
QYPRGDRSVV

SEQ ID NO: 139282 - protein, 10 aa, synthetic construct
QYLRGDRSVV

SEQ ID NO: 139283 - protein, 10 aa, synthetic construct
QYIRGDRSVV

SEQ ID NO: 139284 - protein, 10 aa, synthetic construct
QYMRGDRSVV

SEQ ID NO: 139285 - protein, 10 aa, synthetic construct
QYWRGDRSVV

SEQ ID NO: 139286 - protein, 10 aa, synthetic construct
QYFRGDRSVV

SEQ ID NO: 139287 - protein, 10 aa, synthetic construct
QYKRGDRSVV

SEQ ID NO: 139288 - protein, 10 aa, synthetic construct
QYRRGDRSVV

SEQ ID NO: 139289 - protein, 10 aa, synthetic construct
QYHRGDRSVV

SEQ ID NO: 139290 - protein, 10 aa, synthetic construct
QYSRGDRSVV

SEQ ID NO: 139291 - protein, 10 aa, synthetic construct
QYTRGDRSVV

SEQ ID NO: 139292 - protein, 10 aa, synthetic construct
QYYRGDRSVV

SEQ ID NO: 139293 - protein, 10 aa, synthetic construct
QYNRGDRSVV

SEQ ID NO: 139294 - protein, 10 aa, synthetic construct
QYQRGDRSVV

SEQ ID NO: 139295 - protein, 10 aa, synthetic construct
QYDRGDRSVV

SEQ ID NO: 139296 - protein, 10 aa, synthetic construct
QYERGDRSVV

SEQ ID NO: 139297 - protein, 10 aa, synthetic construct
QNGRGDRSVV

SEQ ID NO: 139298 - protein, 10 aa, synthetic construct
QNARGDRSVV

SEQ ID NO: 139299 - protein, 10 aa, synthetic construct
QNVRGDRSVV

SEQ ID NO: 139300 - protein, 10 aa, synthetic construct
QNPRGDRSVV

SEQ ID NO: 139301 - protein, 10 aa, synthetic construct
QNLRGDRSVV

SEQ ID NO: 139302 - protein, 10 aa, synthetic construct
QNIRGDRSVV

SEQ ID NO: 139303 - protein, 10 aa, synthetic construct
QNMRGDRSVV

SEQ ID NO: 139304 - protein, 10 aa, synthetic construct
QNWRGDRSVV

SEQ ID NO: 139305 - protein, 10 aa, synthetic construct
QNFRGDRSVV

SEQ ID NO: 139306 - protein, 10 aa, synthetic construct
QNKRGDRSVV

SEQ ID NO: 139307 - protein, 10 aa, synthetic construct
QNRRGDRSVV

SEQ ID NO: 139308 - protein, 10 aa, synthetic construct
QNHRGDRSVV

SEQ ID NO: 139309 - protein, 10 aa, synthetic construct
QNSRGDRSVV

SEQ ID NO: 139310 - protein, 10 aa, synthetic construct
QNTRGDRSVV

SEQ ID NO: 139311 - protein, 10 aa, synthetic construct
QNYRGDRSVV

SEQ ID NO: 139312 - protein, 10 aa, synthetic construct
QNNRGDRSVV

SEQ ID NO: 139313 - protein, 10 aa, synthetic construct
QNQRGDRSVV

SEQ ID NO: 139314 - protein, 10 aa, synthetic construct
QNDRGDRSVV

SEQ ID NO: 139315 - protein, 10 aa, synthetic construct
QNERGDRSVV

SEQ ID NO: 139316 - protein, 10 aa, synthetic construct
QQGRGDRSVV

SEQ ID NO: 139317 - protein, 10 aa, synthetic construct
QQARGDRSVV

SEQ ID NO: 139318 - protein, 10 aa, synthetic construct
QQVRGDRSVV

SEQ ID NO: 139319 - protein, 10 aa, synthetic construct
QQPRGDRSVV

SEQ ID NO: 139320 - protein, 10 aa, synthetic construct
QQLRGDRSVV

SEQ ID NO: 139321 - protein, 10 aa, synthetic construct
QQIRGDRSVV

SEQ ID NO: 139322 - protein, 10 aa, synthetic construct
QQMRGDRSVV

SEQ ID NO: 139323 - protein, 10 aa, synthetic construct
QQWRGDRSVV

SEQ ID NO: 139324 - protein, 10 aa, synthetic construct
QQFRGDRSVV

SEQ ID NO: 139325 - protein, 10 aa, synthetic construct
QQKRGDRSVV

SEQ ID NO: 139326 - protein, 10 aa, synthetic construct
QQRRGDRSVV

SEQ ID NO: 139327 - protein, 10 aa, synthetic construct
QQHRGDRSVV

SEQ ID NO: 139328 - protein, 10 aa, synthetic construct
QQSRGDRSVV

SEQ ID NO: 139329 - protein, 10 aa, synthetic construct
QQTRGDRSVV

SEQ ID NO: 139330 - protein, 10 aa, synthetic construct
QQYRGDRSVV

SEQ ID NO: 139331 - protein, 10 aa, synthetic construct
QQNRGDRSVV

SEQ ID NO: 139332 - protein, 10 aa, synthetic construct
QQQRGDRSVV

SEQ ID NO: 139333 - protein, 10 aa, synthetic construct
QQDRGDRSVV

SEQ ID NO: 139334 - protein, 10 aa, synthetic construct
QQERGDRSVV

SEQ ID NO: 139335 - protein, 10 aa, synthetic construct
QDGRGDRSVV

SEQ ID NO: 139336 - protein, 10 aa, synthetic construct
QDARGDRSVV

SEQ ID NO: 139337 - protein, 10 aa, synthetic construct
QDVRGDRSVV

SEQ ID NO: 139338 - protein, 10 aa, synthetic construct
QDPRGDRSVV

SEQ ID NO: 139339 - protein, 10 aa, synthetic construct
QDLRGDRSVV

SEQ ID NO: 139340 - protein, 10 aa, synthetic construct
QDIRGDRSVV

SEQ ID NO: 139341 - protein, 10 aa, synthetic construct
QDMRGDRSVV

SEQ ID NO: 139342 - protein, 10 aa, synthetic construct
QDWRGDRSVV

SEQ ID NO: 139343 - protein, 10 aa, synthetic construct
QDFRGDRSVV

SEQ ID NO: 139344 - protein, 10 aa, synthetic construct
QDKRGDRSVV

SEQ ID NO: 139345 - protein, 10 aa, synthetic construct
QDRRGDRSVV

SEQ ID NO: 139346 - protein, 10 aa, synthetic construct
QDHRGDRSVV

SEQ ID NO: 139347 - protein, 10 aa, synthetic construct
QDSRGDRSVV

SEQ ID NO: 139348 - protein, 10 aa, synthetic construct
QDTRGDRSVV

SEQ ID NO: 139349 - protein, 10 aa, synthetic construct
QDYRGDRSVV

SEQ ID NO: 139350 - protein, 10 aa, synthetic construct
QDNRGDRSVV

SEQ ID NO: 139351 - protein, 10 aa, synthetic construct
QDQRGDRSVV

SEQ ID NO: 139352 - protein, 10 aa, synthetic construct
QDDRGDRSVV

SEQ ID NO: 139353 - protein, 10 aa, synthetic construct
QDERGDRSVV

SEQ ID NO: 139354 - protein, 10 aa, synthetic construct
QEGRGDRSVV

SEQ ID NO: 139355 - protein, 10 aa, synthetic construct
QEARGDRSVV

SEQ ID NO: 139356 - protein, 10 aa, synthetic construct
QEVRGDRSVV

SEQ ID NO: 139357 - protein, 10 aa, synthetic construct
QEPRGDRSVV

SEQ ID NO: 139358 - protein, 10 aa, synthetic construct
QELRGDRSVV

SEQ ID NO: 139359 - protein, 10 aa, synthetic construct
QEIRGDRSVV

SEQ ID NO: 139360 - protein, 10 aa, synthetic construct
QEMRGDRSVV

SEQ ID NO: 139361 - protein, 10 aa, synthetic construct
QEWRGDRSVV

SEQ ID NO: 139362 - protein, 10 aa, synthetic construct
QEFRGDRSVV

SEQ ID NO: 139363 - protein, 10 aa, synthetic construct
QEKRGDRSVV

SEQ ID NO: 139364 - protein, 10 aa, synthetic construct
QERRGDRSVV

SEQ ID NO: 139365 - protein, 10 aa, synthetic construct
QEHRGDRSVV

SEQ ID NO: 139366 - protein, 10 aa, synthetic construct
QESRGDRSVV

SEQ ID NO: 139367 - protein, 10 aa, synthetic construct
QETRGDRSVV

SEQ ID NO: 139368 - protein, 10 aa, synthetic construct
QEYRGDRSVV

SEQ ID NO: 139369 - protein, 10 aa, synthetic construct
QENRGDRSVV

SEQ ID NO: 139370 - protein, 10 aa, synthetic construct
QEQRGDRSVV

SEQ ID NO: 139371 - protein, 10 aa, synthetic construct
QEDRGDRSVV

SEQ ID NO: 139372 - protein, 10 aa, synthetic construct
QEERGDRSVV

SEQ ID NO: 139373 - protein, 10 aa, synthetic construct
SGGRGDRTNL

SEQ ID NO: 139374 - protein, 10 aa, synthetic construct
SGARGDRTNL

SEQ ID NO: 139375 - protein, 10 aa, synthetic construct
SGVRGDRTNL

SEQ ID NO: 139376 - protein, 10 aa, synthetic construct
SGPRGDRTNL

SEQ ID NO: 139377 - protein, 10 aa, synthetic construct
SGLRGDRTNL

SEQ ID NO: 139378 - protein, 10 aa, synthetic construct
SGIRGDRTNL

SEQ ID NO: 139379 - protein, 10 aa, synthetic construct
SGMRGDRTNL

SEQ ID NO: 139380 - protein, 10 aa, synthetic construct
SGWRGDRTNL

SEQ ID NO: 139381 - protein, 10 aa, synthetic construct
SGFRGDRTNL

SEQ ID NO: 139382 - protein, 10 aa, synthetic construct
SGKRGDRTNL

SEQ ID NO: 139383 - protein, 10 aa, synthetic construct
SGRRGDRTNL

SEQ ID NO: 139384 - protein, 10 aa, synthetic construct
SGHRGDRTNL

SEQ ID NO: 139385 - protein, 10 aa, synthetic construct
SGSRGDRTNL

SEQ ID NO: 139386 - protein, 10 aa, synthetic construct
SGTRGDRTNL

SEQ ID NO: 139387 - protein, 10 aa, synthetic construct
SGYRGDRTNL

SEQ ID NO: 139388 - protein, 10 aa, synthetic construct
SGNRGDRTNL

SEQ ID NO: 139389 - protein, 10 aa, synthetic construct
SGQRGDRTNL

SEQ ID NO: 139390 - protein, 10 aa, synthetic construct
SGDRGDRTNL

SEQ ID NO: 139391 - protein, 10 aa, synthetic construct
SGERGDRTNL

SEQ ID NO: 139392 - protein, 10 aa, synthetic construct
SAGRGDRTNL

SEQ ID NO: 139393 - protein, 10 aa, synthetic construct
SAARGDRTNL

SEQ ID NO: 139394 - protein, 10 aa, synthetic construct
SAVRGDRTNL

SEQ ID NO: 139395 - protein, 10 aa, synthetic construct
SAPRGDRTNL

SEQ ID NO: 139396 - protein, 10 aa, synthetic construct
SALRGDRTNL

SEQ ID NO: 139397 - protein, 10 aa, synthetic construct
SAIRGDRTNL

SEQ ID NO: 139398 - protein, 10 aa, synthetic construct
SAMRGDRTNL

SEQ ID NO: 139399 - protein, 10 aa, synthetic construct
SAWRGDRTNL

SEQ ID NO: 139400 - protein, 10 aa, synthetic construct
SAFRGDRTNL

SEQ ID NO: 139401 - protein, 10 aa, synthetic construct
SAKRGDRTNL

SEQ ID NO: 139402 - protein, 10 aa, synthetic construct
SARRGDRTNL

SEQ ID NO: 139403 - protein, 10 aa, synthetic construct
SAHRGDRTNL

SEQ ID NO: 139404 - protein, 10 aa, synthetic construct
SASRGDRTNL

SEQ ID NO: 139405 - protein, 10 aa, synthetic construct
SATRGDRTNL

SEQ ID NO: 139406 - protein, 10 aa, synthetic construct
SAYRGDRTNL

SEQ ID NO: 139407 - protein, 10 aa, synthetic construct
SANRGDRTNL

SEQ ID NO: 139408 - protein, 10 aa, synthetic construct
SAQRGDRTNL

SEQ ID NO: 139409 - protein, 10 aa, synthetic construct
SADRGDRTNL

SEQ ID NO: 139410 - protein, 10 aa, synthetic construct
SAERGDRTNL

SEQ ID NO: 139411 - protein, 10 aa, synthetic construct
SVGRGDRTNL

SEQ ID NO: 139412 - protein, 10 aa, synthetic construct
SVARGDRTNL

SEQ ID NO: 139413 - protein, 10 aa, synthetic construct
SVVRGDRTNL

SEQ ID NO: 139414 - protein, 10 aa, synthetic construct
SVPRGDRTNL

SEQ ID NO: 139415 - protein, 10 aa, synthetic construct
SVLRGDRTNL

SEQ ID NO: 139416 - protein, 10 aa, synthetic construct
SVIRGDRTNL

SEQ ID NO: 139417 - protein, 10 aa, synthetic construct
SVMRGDRTNL

SEQ ID NO: 139418 - protein, 10 aa, synthetic construct
SVWRGDRTNL

SEQ ID NO: 139419 - protein, 10 aa, synthetic construct
SVFRGDRTNL

SEQ ID NO: 139420 - protein, 10 aa, synthetic construct
SVKRGDRTNL

SEQ ID NO: 139421 - protein, 10 aa, synthetic construct
SVRRGDRTNL

SEQ ID NO: 139422 - protein, 10 aa, synthetic construct
SVHRGDRTNL

SEQ ID NO: 139423 - protein, 10 aa, synthetic construct
SVSRGDRTNL

SEQ ID NO: 139424 - protein, 10 aa, synthetic construct
SVTRGDRTNL

SEQ ID NO: 139425 - protein, 10 aa, synthetic construct
SVYRGDRTNL

SEQ ID NO: 139426 - protein, 10 aa, synthetic construct
SVNRGDRTNL

SEQ ID NO: 139427 - protein, 10 aa, synthetic construct
SVQRGDRTNL

SEQ ID NO: 139428 - protein, 10 aa, synthetic construct
SVDRGDRTNL

SEQ ID NO: 139429 - protein, 10 aa, synthetic construct
SVERGDRTNL

SEQ ID NO: 139430 - protein, 10 aa, synthetic construct
SPGRGDRTNL

SEQ ID NO: 139431 - protein, 10 aa, synthetic construct
SPARGDRTNL

SEQ ID NO: 139432 - protein, 10 aa, synthetic construct
SPVRGDRTNL

SEQ ID NO: 139433 - protein, 10 aa, synthetic construct
SPPRGDRTNL

SEQ ID NO: 139434 - protein, 10 aa, synthetic construct
SPLRGDRTNL

SEQ ID NO: 139435 - protein, 10 aa, synthetic construct
SPIRGDRTNL

SEQ ID NO: 139436 - protein, 10 aa, synthetic construct
SPMRGDRTNL

SEQ ID NO: 139437 - protein, 10 aa, synthetic construct
SPWRGDRTNL

SEQ ID NO: 139438 - protein, 10 aa, synthetic construct
SPFRGDRTNL

SEQ ID NO: 139439 - protein, 10 aa, synthetic construct
SPKRGDRTNL

SEQ ID NO: 139440 - protein, 10 aa, synthetic construct
SPRRGDRTNL

SEQ ID NO: 139441 - protein, 10 aa, synthetic construct
SPHRGDRTNL

SEQ ID NO: 139442 - protein, 10 aa, synthetic construct
SPSRGDRTNL

SEQ ID NO: 139443 - protein, 10 aa, synthetic construct
SPTRGDRTNL

SEQ ID NO: 139444 - protein, 10 aa, synthetic construct
SPYRGDRTNL

SEQ ID NO: 139445 - protein, 10 aa, synthetic construct
SPNRGDRTNL

SEQ ID NO: 139446 - protein, 10 aa, synthetic construct
SPQRGDRTNL

SEQ ID NO: 139447 - protein, 10 aa, synthetic construct
SPDRGDRTNL

SEQ ID NO: 139448 - protein, 10 aa, synthetic construct
SPERGDRTNL

SEQ ID NO: 139449 - protein, 10 aa, synthetic construct
SLGRGDRTNL

SEQ ID NO: 139450 - protein, 10 aa, synthetic construct
SLARGDRTNL

SEQ ID NO: 139451 - protein, 10 aa, synthetic construct
SLVRGDRTNL

SEQ ID NO: 139452 - protein, 10 aa, synthetic construct
SLPRGDRTNL

SEQ ID NO: 139453 - protein, 10 aa, synthetic construct
SLLRGDRTNL

SEQ ID NO: 139454 - protein, 10 aa, synthetic construct
SLIRGDRTNL

SEQ ID NO: 139455 - protein, 10 aa, synthetic construct
SLMRGDRTNL

SEQ ID NO: 139456 - protein, 10 aa, synthetic construct
SLWRGDRTNL

SEQ ID NO: 139457 - protein, 10 aa, synthetic construct
SLFRGDRTNL

SEQ ID NO: 139458 - protein, 10 aa, synthetic construct
SLKRGDRTNL

SEQ ID NO: 139459 - protein, 10 aa, synthetic construct
SLRRGDRTNL

SEQ ID NO: 139460 - protein, 10 aa, synthetic construct
SLHRGDRTNL

SEQ ID NO: 139461 - protein, 10 aa, synthetic construct
SLSRGDRTNL

SEQ ID NO: 139462 - protein, 10 aa, synthetic construct
SLTRGDRTNL

SEQ ID NO: 139463 - protein, 10 aa, synthetic construct
SLYRGDRTNL

SEQ ID NO: 139464 - protein, 10 aa, synthetic construct
SLNRGDRTNL

SEQ ID NO: 139465 - protein, 10 aa, synthetic construct
SLQRGDRTNL

SEQ ID NO: 139466 - protein, 10 aa, synthetic construct
SLDRGDRTNL

SEQ ID NO: 139467 - protein, 10 aa, synthetic construct
SLERGDRTNL

SEQ ID NO: 139468 - protein, 10 aa, synthetic construct
SIGRGDRTNL

SEQ ID NO: 139469 - protein, 10 aa, synthetic construct
SIARGDRTNL

SEQ ID NO: 139470 - protein, 10 aa, synthetic construct
SIVRGDRTNL

SEQ ID NO: 139471 - protein, 10 aa, synthetic construct
SIPRGDRTNL

SEQ ID NO: 139472 - protein, 10 aa, synthetic construct
SILRGDRTNL

SEQ ID NO: 139473 - protein, 10 aa, synthetic construct
SIIRGDRTNL

SEQ ID NO: 139474 - protein, 10 aa, synthetic construct
SIMRGDRTNL

SEQ ID NO: 139475 - protein, 10 aa, synthetic construct
SIWRGDRTNL

SEQ ID NO: 139476 - protein, 10 aa, synthetic construct
SIFRGDRTNL

SEQ ID NO: 139477 - protein, 10 aa, synthetic construct
SIKRGDRTNL

SEQ ID NO: 139478 - protein, 10 aa, synthetic construct
SIRRGDRTNL

SEQ ID NO: 139479 - protein, 10 aa, synthetic construct
SIHRGDRTNL

SEQ ID NO: 139480 - protein, 10 aa, synthetic construct
SISRGDRTNL

SEQ ID NO: 139481 - protein, 10 aa, synthetic construct
SITRGDRTNL

SEQ ID NO: 139482 - protein, 10 aa, synthetic construct
SIYRGDRTNL

SEQ ID NO: 139483 - protein, 10 aa, synthetic construct
SINRGDRTNL

SEQ ID NO: 139484 - protein, 10 aa, synthetic construct
SIQRGDRTNL

SEQ ID NO: 139485 - protein, 10 aa, synthetic construct
SIDRGDRTNL

SEQ ID NO: 139486 - protein, 10 aa, synthetic construct
SIERGDRTNL

SEQ ID NO: 139487 - protein, 10 aa, synthetic construct
SMGRGDRTNL

SEQ ID NO: 139488 - protein, 10 aa, synthetic construct
SMARGDRTNL

SEQ ID NO: 139489 - protein, 10 aa, synthetic construct
SMVRGDRTNL

SEQ ID NO: 139490 - protein, 10 aa, synthetic construct
SMPRGDRTNL

SEQ ID NO: 139491 - protein, 10 aa, synthetic construct
SMLRGDRTNL

SEQ ID NO: 139492 - protein, 10 aa, synthetic construct
SMIRGDRTNL

SEQ ID NO: 139493 - protein, 10 aa, synthetic construct
SMMRGDRTNL

SEQ ID NO: 139494 - protein, 10 aa, synthetic construct
SMWRGDRTNL

SEQ ID NO: 139495 - protein, 10 aa, synthetic construct
SMFRGDRTNL

SEQ ID NO: 139496 - protein, 10 aa, synthetic construct
SMKRGDRTNL

SEQ ID NO: 139497 - protein, 10 aa, synthetic construct
SMRRGDRTNL

SEQ ID NO: 139498 - protein, 10 aa, synthetic construct
SMHRGDRTNL

SEQ ID NO: 139499 - protein, 10 aa, synthetic construct
SMSRGDRTNL

SEQ ID NO: 139500 - protein, 10 aa, synthetic construct
SMTRGDRTNL

SEQ ID NO: 139501 - protein, 10 aa, synthetic construct
SMYRGDRTNL

SEQ ID NO: 139502 - protein, 10 aa, synthetic construct
SMNRGDRTNL

SEQ ID NO: 139503 - protein, 10 aa, synthetic construct
SMQRGDRTNL

SEQ ID NO: 139504 - protein, 10 aa, synthetic construct
SMDRGDRTNL

SEQ ID NO: 139505 - protein, 10 aa, synthetic construct
SMERGDRTNL

SEQ ID NO: 139506 - protein, 10 aa, synthetic construct
SWGRGDRTNL

SEQ ID NO: 139507 - protein, 10 aa, synthetic construct
SWARGDRTNL

SEQ ID NO: 139508 - protein, 10 aa, synthetic construct
SWVRGDRTNL

SEQ ID NO: 139509 - protein, 10 aa, synthetic construct
SWPRGDRTNL

SEQ ID NO: 139510 - protein, 10 aa, synthetic construct
SWLRGDRTNL

SEQ ID NO: 139511 - protein, 10 aa, synthetic construct
SWIRGDRTNL

SEQ ID NO: 139512 - protein, 10 aa, synthetic construct
SWMRGDRTNL

SEQ ID NO: 139513 - protein, 10 aa, synthetic construct
SWWRGDRTNL

SEQ ID NO: 139514 - protein, 10 aa, synthetic construct
SWFRGDRTNL

SEQ ID NO: 139515 - protein, 10 aa, synthetic construct
SWKRGDRTNL

SEQ ID NO: 139516 - protein, 10 aa, synthetic construct
SWRRGDRTNL

SEQ ID NO: 139517 - protein, 10 aa, synthetic construct
SWHRGDRTNL

SEQ ID NO: 139518 - protein, 10 aa, synthetic construct
SWSRGDRTNL

SEQ ID NO: 139519 - protein, 10 aa, synthetic construct
SWTRGDRTNL

SEQ ID NO: 139520 - protein, 10 aa, synthetic construct
SWYRGDRTNL

SEQ ID NO: 139521 - protein, 10 aa, synthetic construct
SWNRGDRTNL

SEQ ID NO: 139522 - protein, 10 aa, synthetic construct
SWQRGDRTNL

SEQ ID NO: 139523 - protein, 10 aa, synthetic construct
SWDRGDRTNL

SEQ ID NO: 139524 - protein, 10 aa, synthetic construct
SWERGDRTNL

SEQ ID NO: 139525 - protein, 10 aa, synthetic construct
SFGRGDRTNL

SEQ ID NO: 139526 - protein, 10 aa, synthetic construct
SFARGDRTNL

SEQ ID NO: 139527 - protein, 10 aa, synthetic construct
SFVRGDRTNL

SEQ ID NO: 139528 - protein, 10 aa, synthetic construct
SFPRGDRTNL

SEQ ID NO: 139529 - protein, 10 aa, synthetic construct
SFLRGDRTNL

SEQ ID NO: 139530 - protein, 10 aa, synthetic construct
SFIRGDRTNL

SEQ ID NO: 139531 - protein, 10 aa, synthetic construct
SFMRGDRTNL

SEQ ID NO: 139532 - protein, 10 aa, synthetic construct
SFWRGDRTNL

SEQ ID NO: 139533 - protein, 10 aa, synthetic construct
SFFRGDRTNL

SEQ ID NO: 139534 - protein, 10 aa, synthetic construct
SFKRGDRTNL

SEQ ID NO: 139535 - protein, 10 aa, synthetic construct
SFRRGDRTNL

SEQ ID NO: 139536 - protein, 10 aa, synthetic construct
SFHRGDRTNL

SEQ ID NO: 139537 - protein, 10 aa, synthetic construct
SFSRGDRTNL

SEQ ID NO: 139538 - protein, 10 aa, synthetic construct
SFTRGDRTNL

SEQ ID NO: 139539 - protein, 10 aa, synthetic construct
SFYRGDRTNL

SEQ ID NO: 139540 - protein, 10 aa, synthetic construct
SFNRGDRTNL

SEQ ID NO: 139541 - protein, 10 aa, synthetic construct
SFQRGDRTNL

SEQ ID NO: 139542 - protein, 10 aa, synthetic construct
SFDRGDRTNL

SEQ ID NO: 139543 - protein, 10 aa, synthetic construct
SFERGDRTNL

SEQ ID NO: 139544 - protein, 10 aa, synthetic construct
SKGRGDRTNL

SEQ ID NO: 139545 - protein, 10 aa, synthetic construct
SKARGDRTNL

SEQ ID NO: 139546 - protein, 10 aa, synthetic construct
SKVRGDRTNL

SEQ ID NO: 139547 - protein, 10 aa, synthetic construct
SKPRGDRTNL

SEQ ID NO: 139548 - protein, 10 aa, synthetic construct
SKLRGDRTNL

SEQ ID NO: 139549 - protein, 10 aa, synthetic construct
SKIRGDRTNL

SEQ ID NO: 139550 - protein, 10 aa, synthetic construct
SKMRGDRTNL

SEQ ID NO: 139551 - protein, 10 aa, synthetic construct
SKWRGDRTNL

SEQ ID NO: 139552 - protein, 10 aa, synthetic construct
SKFRGDRTNL

SEQ ID NO: 139553 - protein, 10 aa, synthetic construct
SKKRGDRTNL

SEQ ID NO: 139554 - protein, 10 aa, synthetic construct
SKRRGDRTNL

SEQ ID NO: 139555 - protein, 10 aa, synthetic construct
SKHRGDRTNL

SEQ ID NO: 139556 - protein, 10 aa, synthetic construct
SKSRGDRTNL

SEQ ID NO: 139557 - protein, 10 aa, synthetic construct
SKTRGDRTNL

SEQ ID NO: 139558 - protein, 10 aa, synthetic construct
SKYRGDRTNL

SEQ ID NO: 139559 - protein, 10 aa, synthetic construct
SKNRGDRTNL

SEQ ID NO: 139560 - protein, 10 aa, synthetic construct
SKQRGDRTNL

SEQ ID NO: 139561 - protein, 10 aa, synthetic construct
SKDRGDRTNL

SEQ ID NO: 139562 - protein, 10 aa, synthetic construct
SKERGDRTNL

SEQ ID NO: 139563 - protein, 10 aa, synthetic construct
SRGRGDRTNL

SEQ ID NO: 139564 - protein, 10 aa, synthetic construct
SRARGDRTNL

SEQ ID NO: 139565 - protein, 10 aa, synthetic construct
SRVRGDRTNL

SEQ ID NO: 139566 - protein, 10 aa, synthetic construct
SRPRGDRTNL

SEQ ID NO: 139567 - protein, 10 aa, synthetic construct
SRLRGDRTNL

SEQ ID NO: 139568 - protein, 10 aa, synthetic construct
SRIRGDRTNL

SEQ ID NO: 139569 - protein, 10 aa, synthetic construct
SRMRGDRTNL

SEQ ID NO: 139570 - protein, 10 aa, synthetic construct
SRWRGDRTNL

SEQ ID NO: 139571 - protein, 10 aa, synthetic construct
SRFRGDRTNL

SEQ ID NO: 139572 - protein, 10 aa, synthetic construct
SRKRGDRTNL

SEQ ID NO: 139573 - protein, 10 aa, synthetic construct
SRRRGDRTNL

SEQ ID NO: 139574 - protein, 10 aa, synthetic construct
SRHRGDRTNL

SEQ ID NO: 139575 - protein, 10 aa, synthetic construct
SRSRGDRTNL

SEQ ID NO: 139576 - protein, 10 aa, synthetic construct
SRTRGDRTNL

SEQ ID NO: 139577 - protein, 10 aa, synthetic construct
SRYRGDRTNL

SEQ ID NO: 139578 - protein, 10 aa, synthetic construct
SRNRGDRTNL

SEQ ID NO: 139579 - protein, 10 aa, synthetic construct
SRQRGDRTNL

SEQ ID NO: 139580 - protein, 10 aa, synthetic construct
SRDRGDRTNL

SEQ ID NO: 139581 - protein, 10 aa, synthetic construct
SRERGDRTNL

SEQ ID NO: 139582 - protein, 10 aa, synthetic construct
SHGRGDRTNL

SEQ ID NO: 139583 - protein, 10 aa, synthetic construct
SHARGDRTNL

SEQ ID NO: 139584 - protein, 10 aa, synthetic construct
SHVRGDRTNL

SEQ ID NO: 139585 - protein, 10 aa, synthetic construct
SHPRGDRTNL

SEQ ID NO: 139586 - protein, 10 aa, synthetic construct
SHLRGDRTNL

SEQ ID NO: 139587 - protein, 10 aa, synthetic construct
SHIRGDRTNL

SEQ ID NO: 139588 - protein, 10 aa, synthetic construct
SHMRGDRTNL

SEQ ID NO: 139589 - protein, 10 aa, synthetic construct
SHWRGDRTNL

SEQ ID NO: 139590 - protein, 10 aa, synthetic construct
SHFRGDRTNL

SEQ ID NO: 139591 - protein, 10 aa, synthetic construct
SHKRGDRTNL

SEQ ID NO: 139592 - protein, 10 aa, synthetic construct
SHRRGDRTNL

SEQ ID NO: 139593 - protein, 10 aa, synthetic construct
SHHRGDRTNL

SEQ ID NO: 139594 - protein, 10 aa, synthetic construct
SHSRGDRTNL

SEQ ID NO: 139595 - protein, 10 aa, synthetic construct
SHTRGDRTNL

SEQ ID NO: 139596 - protein, 10 aa, synthetic construct
SHYRGDRTNL

SEQ ID NO: 139597 - protein, 10 aa, synthetic construct
SHNRGDRTNL

SEQ ID NO: 139598 - protein, 10 aa, synthetic construct
SHQRGDRTNL

SEQ ID NO: 139599 - protein, 10 aa, synthetic construct
SHDRGDRTNL

SEQ ID NO: 139600 - protein, 10 aa, synthetic construct
SHERGDRTNL

SEQ ID NO: 139601 - protein, 10 aa, synthetic construct
SSGRGDRTNL

SEQ ID NO: 139602 - protein, 10 aa, synthetic construct
SSARGDRTNL

SEQ ID NO: 139603 - protein, 10 aa, synthetic construct
SSVRGDRTNL

SEQ ID NO: 139604 - protein, 10 aa, synthetic construct
SSPRGDRTNL

SEQ ID NO: 139605 - protein, 10 aa, synthetic construct
SSLRGDRTNL

SEQ ID NO: 139606 - protein, 10 aa, synthetic construct
SSIRGDRTNL

SEQ ID NO: 139607 - protein, 10 aa, synthetic construct
SSMRGDRTNL

SEQ ID NO: 139608 - protein, 10 aa, synthetic construct
SSWRGDRTNL

SEQ ID NO: 139609 - protein, 10 aa, synthetic construct
SSFRGDRTNL

SEQ ID NO: 139610 - protein, 10 aa, synthetic construct
SSKRGDRTNL

SEQ ID NO: 139611 - protein, 10 aa, synthetic construct
SSRRGDRTNL

SEQ ID NO: 139612 - protein, 10 aa, synthetic construct
SSHRGDRTNL

SEQ ID NO: 139613 - protein, 10 aa, synthetic construct
SSSRGDRTNL

SEQ ID NO: 139614 - protein, 10 aa, synthetic construct
SSTRGDRTNL

SEQ ID NO: 139615 - protein, 10 aa, synthetic construct
SSYRGDRTNL

SEQ ID NO: 139616 - protein, 10 aa, synthetic construct
SSNRGDRTNL

SEQ ID NO: 139617 - protein, 10 aa, synthetic construct
SSQRGDRTNL

SEQ ID NO: 139618 - protein, 10 aa, synthetic construct
SSDRGDRTNL

SEQ ID NO: 139619 - protein, 10 aa, synthetic construct
SSERGDRTNL

SEQ ID NO: 139620 - protein, 10 aa, synthetic construct
STGRGDRTNL

SEQ ID NO: 139621 - protein, 10 aa, synthetic construct
STARGDRTNL

SEQ ID NO: 139622 - protein, 10 aa, synthetic construct
STVRGDRTNL

SEQ ID NO: 139623 - protein, 10 aa, synthetic construct
STPRGDRTNL

SEQ ID NO: 139624 - protein, 10 aa, synthetic construct
STLRGDRTNL

SEQ ID NO: 139625 - protein, 10 aa, synthetic construct
STIRGDRTNL

SEQ ID NO: 139626 - protein, 10 aa, synthetic construct
STMRGDRTNL

SEQ ID NO: 139627 - protein, 10 aa, synthetic construct
STWRGDRTNL

SEQ ID NO: 139628 - protein, 10 aa, synthetic construct
STFRGDRTNL

SEQ ID NO: 139629 - protein, 10 aa, synthetic construct
STKRGDRTNL

SEQ ID NO: 139630 - protein, 10 aa, synthetic construct
STRRGDRTNL

SEQ ID NO: 139631 - protein, 10 aa, synthetic construct
STHRGDRTNL

SEQ ID NO: 139632 - protein, 10 aa, synthetic construct
STSRGDRTNL

SEQ ID NO: 139633 - protein, 10 aa, synthetic construct
STTRGDRTNL

SEQ ID NO: 139634 - protein, 10 aa, synthetic construct
STYRGDRTNL

SEQ ID NO: 139635 - protein, 10 aa, synthetic construct
STNRGDRTNL

SEQ ID NO: 139636 - protein, 10 aa, synthetic construct
STQRGDRTNL

SEQ ID NO: 139637 - protein, 10 aa, synthetic construct
STDRGDRTNL

SEQ ID NO: 139638 - protein, 10 aa, synthetic construct
STERGDRTNL

SEQ ID NO: 139639 - protein, 10 aa, synthetic construct
SYGRGDRTNL

SEQ ID NO: 139640 - protein, 10 aa, synthetic construct
SYARGDRTNL

SEQ ID NO: 139641 - protein, 10 aa, synthetic construct
SYVRGDRTNL

SEQ ID NO: 139642 - protein, 10 aa, synthetic construct
SYPRGDRTNL

SEQ ID NO: 139643 - protein, 10 aa, synthetic construct
SYLRGDRTNL

SEQ ID NO: 139644 - protein, 10 aa, synthetic construct
SYIRGDRTNL

SEQ ID NO: 139645 - protein, 10 aa, synthetic construct
SYMRGDRTNL

SEQ ID NO: 139646 - protein, 10 aa, synthetic construct
SYWRGDRTNL

SEQ ID NO: 139647 - protein, 10 aa, synthetic construct
SYFRGDRTNL

SEQ ID NO: 139648 - protein, 10 aa, synthetic construct
SYKRGDRTNL

SEQ ID NO: 139649 - protein, 10 aa, synthetic construct
SYRRGDRTNL

SEQ ID NO: 139650 - protein, 10 aa, synthetic construct
SYHRGDRTNL

SEQ ID NO: 139651 - protein, 10 aa, synthetic construct
SYSRGDRTNL

SEQ ID NO: 139652 - protein, 10 aa, synthetic construct
SYTRGDRTNL

SEQ ID NO: 139653 - protein, 10 aa, synthetic construct
SYYRGDRTNL

SEQ ID NO: 139654 - protein, 10 aa, synthetic construct
SYNRGDRTNL

SEQ ID NO: 139655 - protein, 10 aa, synthetic construct
SYQRGDRTNL

SEQ ID NO: 139656 - protein, 10 aa, synthetic construct
SYDRGDRTNL

SEQ ID NO: 139657 - protein, 10 aa, synthetic construct
SYERGDRTNL

SEQ ID NO: 139658 - protein, 10 aa, synthetic construct
SNGRGDRTNL

SEQ ID NO: 139659 - protein, 10 aa, synthetic construct
SNARGDRTNL

SEQ ID NO: 139660 - protein, 10 aa, synthetic construct
SNVRGDRTNL

SEQ ID NO: 139661 - protein, 10 aa, synthetic construct
SNPRGDRTNL

SEQ ID NO: 139662 - protein, 10 aa, synthetic construct
SNLRGDRTNL

SEQ ID NO: 139663 - protein, 10 aa, synthetic construct
SNIRGDRTNL

SEQ ID NO: 139664 - protein, 10 aa, synthetic construct
SNMRGDRTNL

SEQ ID NO: 139665 - protein, 10 aa, synthetic construct
SNWRGDRTNL

SEQ ID NO: 139666 - protein, 10 aa, synthetic construct
SNFRGDRTNL

SEQ ID NO: 139667 - protein, 10 aa, synthetic construct
SNKRGDRTNL

SEQ ID NO: 139668 - protein, 10 aa, synthetic construct
SNRRGDRTNL

SEQ ID NO: 139669 - protein, 10 aa, synthetic construct
SNHRGDRTNL

SEQ ID NO: 139670 - protein, 10 aa, synthetic construct
SNSRGDRTNL

SEQ ID NO: 139671 - protein, 10 aa, synthetic construct
SNTRGDRTNL

SEQ ID NO: 139672 - protein, 10 aa, synthetic construct
SNYRGDRTNL

SEQ ID NO: 139673 - protein, 10 aa, synthetic construct
SNNRGDRTNL

SEQ ID NO: 139674 - protein, 10 aa, synthetic construct
SNQRGDRTNL

SEQ ID NO: 139675 - protein, 10 aa, synthetic construct
SNDRGDRTNL

SEQ ID NO: 139676 - protein, 10 aa, synthetic construct
SNERGDRTNL

SEQ ID NO: 139677 - protein, 10 aa, synthetic construct
SQGRGDRTNL

SEQ ID NO: 139678 - protein, 10 aa, synthetic construct
SQARGDRTNL

SEQ ID NO: 139679 - protein, 10 aa, synthetic construct
SQVRGDRTNL

SEQ ID NO: 139680 - protein, 10 aa, synthetic construct
SQPRGDRTNL

SEQ ID NO: 139681 - protein, 10 aa, synthetic construct
SQLRGDRTNL

SEQ ID NO: 139682 - protein, 10 aa, synthetic construct
SQIRGDRTNL

SEQ ID NO: 139683 - protein, 10 aa, synthetic construct
SQMRGDRTNL

SEQ ID NO: 139684 - protein, 10 aa, synthetic construct
SQWRGDRTNL

SEQ ID NO: 139685 - protein, 10 aa, synthetic construct
SQFRGDRTNL

SEQ ID NO: 139686 - protein, 10 aa, synthetic construct
SQKRGDRTNL

SEQ ID NO: 139687 - protein, 10 aa, synthetic construct
SQRRGDRTNL

SEQ ID NO: 139688 - protein, 10 aa, synthetic construct
SQHRGDRTNL

SEQ ID NO: 139689 - protein, 10 aa, synthetic construct
SQSRGDRTNL

SEQ ID NO: 139690 - protein, 10 aa, synthetic construct
SQTRGDRTNL

SEQ ID NO: 139691 - protein, 10 aa, synthetic construct
SQYRGDRTNL

SEQ ID NO: 139692 - protein, 10 aa, synthetic construct
SQNRGDRTNL

SEQ ID NO: 139693 - protein, 10 aa, synthetic construct
SQQRGDRTNL

SEQ ID NO: 139694 - protein, 10 aa, synthetic construct
SQDRGDRTNL

SEQ ID NO: 139695 - protein, 10 aa, synthetic construct
SQERGDRTNL

SEQ ID NO: 139696 - protein, 10 aa, synthetic construct
SDGRGDRTNL

SEQ ID NO: 139697 - protein, 10 aa, synthetic construct
SDARGDRTNL

SEQ ID NO: 139698 - protein, 10 aa, synthetic construct
SDVRGDRTNL

SEQ ID NO: 139699 - protein, 10 aa, synthetic construct
SDPRGDRTNL

SEQ ID NO: 139700 - protein, 10 aa, synthetic construct
SDLRGDRTNL

SEQ ID NO: 139701 - protein, 10 aa, synthetic construct
SDIRGDRTNL

SEQ ID NO: 139702 - protein, 10 aa, synthetic construct
SDMRGDRTNL

SEQ ID NO: 139703 - protein, 10 aa, synthetic construct
SDWRGDRTNL

SEQ ID NO: 139704 - protein, 10 aa, synthetic construct
SDFRGDRTNL

SEQ ID NO: 139705 - protein, 10 aa, synthetic construct
SDKRGDRTNL

SEQ ID NO: 139706 - protein, 10 aa, synthetic construct
SDRRGDRTNL

SEQ ID NO: 139707 - protein, 10 aa, synthetic construct
SDHRGDRTNL

SEQ ID NO: 139708 - protein, 10 aa, synthetic construct
SDSRGDRTNL

SEQ ID NO: 139709 - protein, 10 aa, synthetic construct
SDTRGDRTNL

SEQ ID NO: 139710 - protein, 10 aa, synthetic construct
SDYRGDRTNL

SEQ ID NO: 139711 - protein, 10 aa, synthetic construct
SDNRGDRTNL

SEQ ID NO: 139712 - protein, 10 aa, synthetic construct
SDQRGDRTNL

SEQ ID NO: 139713 - protein, 10 aa, synthetic construct
SDDRGDRTNL

SEQ ID NO: 139714 - protein, 10 aa, synthetic construct
SDERGDRTNL

SEQ ID NO: 139715 - protein, 10 aa, synthetic construct
SEGRGDRTNL

SEQ ID NO: 139716 - protein, 10 aa, synthetic construct
SEARGDRTNL

SEQ ID NO: 139717 - protein, 10 aa, synthetic construct
SEVRGDRTNL

SEQ ID NO: 139718 - protein, 10 aa, synthetic construct
SEPRGDRTNL

SEQ ID NO: 139719 - protein, 10 aa, synthetic construct
SELRGDRTNL

SEQ ID NO: 139720 - protein, 10 aa, synthetic construct
SEIRGDRTNL

SEQ ID NO: 139721 - protein, 10 aa, synthetic construct
SEMRGDRTNL

SEQ ID NO: 139722 - protein, 10 aa, synthetic construct
SEWRGDRTNL

SEQ ID NO: 139723 - protein, 10 aa, synthetic construct
SEFRGDRTNL

SEQ ID NO: 139724 - protein, 10 aa, synthetic construct
SEKRGDRTNL

SEQ ID NO: 139725 - protein, 10 aa, synthetic construct
SERRGDRTNL

SEQ ID NO: 139726 - protein, 10 aa, synthetic construct
SEHRGDRTNL

SEQ ID NO: 139727 - protein, 10 aa, synthetic construct
SESRGDRTNL

SEQ ID NO: 139728 - protein, 10 aa, synthetic construct
SETRGDRTNL

SEQ ID NO: 139729 - protein, 10 aa, synthetic construct
SEYRGDRTNL

SEQ ID NO: 139730 - protein, 10 aa, synthetic construct
SENRGDRTNL

SEQ ID NO: 139731 - protein, 10 aa, synthetic construct
SEQRGDRTNL

SEQ ID NO: 139732 - protein, 10 aa, synthetic construct
SEDRGDRTNL

SEQ ID NO: 139733 - protein, 10 aa, synthetic construct
SEERGDRTNL

SEQ ID NO: 139734 - protein, 10 aa, synthetic construct
TGGRGDRTNL

SEQ ID NO: 139735 - protein, 10 aa, synthetic construct
TGARGDRTNL

SEQ ID NO: 139736 - protein, 10 aa, synthetic construct
TGVRGDRTNL

SEQ ID NO: 139737 - protein, 10 aa, synthetic construct
TGPRGDRTNL

SEQ ID NO: 139738 - protein, 10 aa, synthetic construct
TGLRGDRTNL

SEQ ID NO: 139739 - protein, 10 aa, synthetic construct
TGIRGDRTNL

SEQ ID NO: 139740 - protein, 10 aa, synthetic construct
TGMRGDRTNL

SEQ ID NO: 139741 - protein, 10 aa, synthetic construct
TGWRGDRTNL

SEQ ID NO: 139742 - protein, 10 aa, synthetic construct
TGFRGDRTNL

SEQ ID NO: 139743 - protein, 10 aa, synthetic construct
TGKRGDRTNL

SEQ ID NO: 139744 - protein, 10 aa, synthetic construct
TGRRGDRTNL

SEQ ID NO: 139745 - protein, 10 aa, synthetic construct
TGHRGDRTNL

SEQ ID NO: 139746 - protein, 10 aa, synthetic construct
TGSRGDRTNL

SEQ ID NO: 139747 - protein, 10 aa, synthetic construct
TGTRGDRTNL

SEQ ID NO: 139748 - protein, 10 aa, synthetic construct
TGYRGDRTNL

SEQ ID NO: 139749 - protein, 10 aa, synthetic construct
TGNRGDRTNL

SEQ ID NO: 139750 - protein, 10 aa, synthetic construct
TGQRGDRTNL

SEQ ID NO: 139751 - protein, 10 aa, synthetic construct
TGDRGDRTNL

SEQ ID NO: 139752 - protein, 10 aa, synthetic construct
TGERGDRTNL

SEQ ID NO: 139753 - protein, 10 aa, synthetic construct
TAGRGDRTNL

SEQ ID NO: 139754 - protein, 10 aa, synthetic construct
TAARGDRTNL

SEQ ID NO: 139755 - protein, 10 aa, synthetic construct
TAVRGDRTNL

SEQ ID NO: 139756 - protein, 10 aa, synthetic construct
TAPRGDRTNL

SEQ ID NO: 139757 - protein, 10 aa, synthetic construct
TALRGDRTNL

SEQ ID NO: 139758 - protein, 10 aa, synthetic construct
TAIRGDRTNL

SEQ ID NO: 139759 - protein, 10 aa, synthetic construct
TAMRGDRTNL

SEQ ID NO: 139760 - protein, 10 aa, synthetic construct
TAWRGDRTNL

SEQ ID NO: 139761 - protein, 10 aa, synthetic construct
TAFRGDRTNL

SEQ ID NO: 139762 - protein, 10 aa, synthetic construct
TAKRGDRTNL

SEQ ID NO: 139763 - protein, 10 aa, synthetic construct
TARRGDRTNL

SEQ ID NO: 139764 - protein, 10 aa, synthetic construct
TAHRGDRTNL

SEQ ID NO: 139765 - protein, 10 aa, synthetic construct
TASRGDRTNL

SEQ ID NO: 139766 - protein, 10 aa, synthetic construct
TATRGDRTNL

SEQ ID NO: 139767 - protein, 10 aa, synthetic construct
TAYRGDRTNL

SEQ ID NO: 139768 - protein, 10 aa, synthetic construct
TANRGDRTNL

SEQ ID NO: 139769 - protein, 10 aa, synthetic construct
TAQRGDRTNL

SEQ ID NO: 139770 - protein, 10 aa, synthetic construct
TADRGDRTNL

SEQ ID NO: 139771 - protein, 10 aa, synthetic construct
TAERGDRTNL

SEQ ID NO: 139772 - protein, 10 aa, synthetic construct
TVGRGDRTNL

SEQ ID NO: 139773 - protein, 10 aa, synthetic construct
TVARGDRTNL

SEQ ID NO: 139774 - protein, 10 aa, synthetic construct
TVVRGDRTNL

SEQ ID NO: 139775 - protein, 10 aa, synthetic construct
TVPRGDRTNL

SEQ ID NO: 139776 - protein, 10 aa, synthetic construct
TVLRGDRTNL

SEQ ID NO: 139777 - protein, 10 aa, synthetic construct
TVIRGDRTNL

SEQ ID NO: 139778 - protein, 10 aa, synthetic construct
TVMRGDRTNL

SEQ ID NO: 139779 - protein, 10 aa, synthetic construct
TVWRGDRTNL

SEQ ID NO: 139780 - protein, 10 aa, synthetic construct
TVFRGDRTNL

SEQ ID NO: 139781 - protein, 10 aa, synthetic construct
TVKRGDRTNL

SEQ ID NO: 139782 - protein, 10 aa, synthetic construct
TVRRGDRTNL

SEQ ID NO: 139783 - protein, 10 aa, synthetic construct
TVHRGDRTNL

SEQ ID NO: 139784 - protein, 10 aa, synthetic construct
TVSRGDRTNL

SEQ ID NO: 139785 - protein, 10 aa, synthetic construct
TVTRGDRTNL

SEQ ID NO: 139786 - protein, 10 aa, synthetic construct
TVYRGDRTNL

SEQ ID NO: 139787 - protein, 10 aa, synthetic construct
TVNRGDRTNL

SEQ ID NO: 139788 - protein, 10 aa, synthetic construct
TVQRGDRTNL

SEQ ID NO: 139789 - protein, 10 aa, synthetic construct
TVDRGDRTNL

SEQ ID NO: 139790 - protein, 10 aa, synthetic construct
TVERGDRTNL

SEQ ID NO: 139791 - protein, 10 aa, synthetic construct
TPGRGDRTNL

SEQ ID NO: 139792 - protein, 10 aa, synthetic construct
TPARGDRTNL

SEQ ID NO: 139793 - protein, 10 aa, synthetic construct
TPVRGDRTNL

SEQ ID NO: 139794 - protein, 10 aa, synthetic construct
TPPRGDRTNL

SEQ ID NO: 139795 - protein, 10 aa, synthetic construct
TPLRGDRTNL

SEQ ID NO: 139796 - protein, 10 aa, synthetic construct
TPIRGDRTNL

SEQ ID NO: 139797 - protein, 10 aa, synthetic construct
TPMRGDRTNL

SEQ ID NO: 139798 - protein, 10 aa, synthetic construct
TPWRGDRTNL

SEQ ID NO: 139799 - protein, 10 aa, synthetic construct
TPFRGDRTNL

SEQ ID NO: 139800 - protein, 10 aa, synthetic construct
TPKRGDRTNL

SEQ ID NO: 139801 - protein, 10 aa, synthetic construct
TPRRGDRTNL

SEQ ID NO: 139802 - protein, 10 aa, synthetic construct
TPHRGDRTNL

SEQ ID NO: 139803 - protein, 10 aa, synthetic construct
TPSRGDRTNL

SEQ ID NO: 139804 - protein, 10 aa, synthetic construct
TPTRGDRTNL

SEQ ID NO: 139805 - protein, 10 aa, synthetic construct
TPYRGDRTNL

SEQ ID NO: 139806 - protein, 10 aa, synthetic construct
TPNRGDRTNL

SEQ ID NO: 139807 - protein, 10 aa, synthetic construct
TPQRGDRTNL

SEQ ID NO: 139808 - protein, 10 aa, synthetic construct
TPDRGDRTNL

SEQ ID NO: 139809 - protein, 10 aa, synthetic construct
TPERGDRTNL

SEQ ID NO: 139810 - protein, 10 aa, synthetic construct
TLGRGDRTNL

SEQ ID NO: 139811 - protein, 10 aa, synthetic construct
TLARGDRTNL

SEQ ID NO: 139812 - protein, 10 aa, synthetic construct
TLVRGDRTNL

SEQ ID NO: 139813 - protein, 10 aa, synthetic construct
TLPRGDRTNL

SEQ ID NO: 139814 - protein, 10 aa, synthetic construct
TLLRGDRTNL

SEQ ID NO: 139815 - protein, 10 aa, synthetic construct
TLIRGDRTNL

SEQ ID NO: 139816 - protein, 10 aa, synthetic construct
TLMRGDRTNL

SEQ ID NO: 139817 - protein, 10 aa, synthetic construct
TLWRGDRTNL

SEQ ID NO: 139818 - protein, 10 aa, synthetic construct
TLFRGDRTNL

SEQ ID NO: 139819 - protein, 10 aa, synthetic construct
TLKRGDRTNL

SEQ ID NO: 139820 - protein, 10 aa, synthetic construct
TLRRGDRTNL

SEQ ID NO: 139821 - protein, 10 aa, synthetic construct
TLHRGDRTNL

SEQ ID NO: 139822 - protein, 10 aa, synthetic construct
TLSRGDRTNL

SEQ ID NO: 139823 - protein, 10 aa, synthetic construct
TLTRGDRTNL

SEQ ID NO: 139824 - protein, 10 aa, synthetic construct
TLYRGDRTNL

SEQ ID NO: 139825 - protein, 10 aa, synthetic construct
TLNRGDRTNL

SEQ ID NO: 139826 - protein, 10 aa, synthetic construct
TLQRGDRTNL

SEQ ID NO: 139827 - protein, 10 aa, synthetic construct
TLDRGDRTNL

SEQ ID NO: 139828 - protein, 10 aa, synthetic construct
TLERGDRTNL

SEQ ID NO: 139829 - protein, 10 aa, synthetic construct
TIGRGDRTNL

SEQ ID NO: 139830 - protein, 10 aa, synthetic construct
TIARGDRTNL

SEQ ID NO: 139831 - protein, 10 aa, synthetic construct
TIVRGDRTNL

SEQ ID NO: 139832 - protein, 10 aa, synthetic construct
TIPRGDRTNL

SEQ ID NO: 139833 - protein, 10 aa, synthetic construct
TILRGDRTNL

SEQ ID NO: 139834 - protein, 10 aa, synthetic construct
TIIRGDRTNL

SEQ ID NO: 139835 - protein, 10 aa, synthetic construct
TIMRGDRTNL

SEQ ID NO: 139836 - protein, 10 aa, synthetic construct
TIWRGDRTNL

SEQ ID NO: 139837 - protein, 10 aa, synthetic construct
TIFRGDRTNL

SEQ ID NO: 139838 - protein, 10 aa, synthetic construct
TIKRGDRTNL

SEQ ID NO: 139839 - protein, 10 aa, synthetic construct
TIRRGDRTNL

SEQ ID NO: 139840 - protein, 10 aa, synthetic construct
TIHRGDRTNL

SEQ ID NO: 139841 - protein, 10 aa, synthetic construct
TISRGDRTNL

SEQ ID NO: 139842 - protein, 10 aa, synthetic construct
TITRGDRTNL

SEQ ID NO: 139843 - protein, 10 aa, synthetic construct
TIYRGDRTNL

SEQ ID NO: 139844 - protein, 10 aa, synthetic construct
TINRGDRTNL

SEQ ID NO: 139845 - protein, 10 aa, synthetic construct
TIQRGDRTNL

SEQ ID NO: 139846 - protein, 10 aa, synthetic construct
TIDRGDRTNL

SEQ ID NO: 139847 - protein, 10 aa, synthetic construct
TIERGDRTNL

SEQ ID NO: 139848 - protein, 10 aa, synthetic construct
TMGRGDRTNL

SEQ ID NO: 139849 - protein, 10 aa, synthetic construct
TMARGDRTNL

SEQ ID NO: 139850 - protein, 10 aa, synthetic construct
TMVRGDRTNL

SEQ ID NO: 139851 - protein, 10 aa, synthetic construct
TMPRGDRTNL

SEQ ID NO: 139852 - protein, 10 aa, synthetic construct
TMLRGDRTNL

SEQ ID NO: 139853 - protein, 10 aa, synthetic construct
TMIRGDRTNL

SEQ ID NO: 139854 - protein, 10 aa, synthetic construct
TMMRGDRTNL

SEQ ID NO: 139855 - protein, 10 aa, synthetic construct
TMWRGDRTNL

SEQ ID NO: 139856 - protein, 10 aa, synthetic construct
TMFRGDRTNL

SEQ ID NO: 139857 - protein, 10 aa, synthetic construct
TMKRGDRTNL

SEQ ID NO: 139858 - protein, 10 aa, synthetic construct
TMRRGDRTNL

SEQ ID NO: 139859 - protein, 10 aa, synthetic construct
TMHRGDRTNL

SEQ ID NO: 139860 - protein, 10 aa, synthetic construct
TMSRGDRTNL

SEQ ID NO: 139861 - protein, 10 aa, synthetic construct
TMTRGDRTNL

SEQ ID NO: 139862 - protein, 10 aa, synthetic construct
TMYRGDRTNL

SEQ ID NO: 139863 - protein, 10 aa, synthetic construct
TMNRGDRTNL

SEQ ID NO: 139864 - protein, 10 aa, synthetic construct
TMQRGDRTNL

SEQ ID NO: 139865 - protein, 10 aa, synthetic construct
TMDRGDRTNL

SEQ ID NO: 139866 - protein, 10 aa, synthetic construct
TMERGDRTNL

SEQ ID NO: 139867 - protein, 10 aa, synthetic construct
TWGRGDRTNL

SEQ ID NO: 139868 - protein, 10 aa, synthetic construct
TWARGDRTNL

SEQ ID NO: 139869 - protein, 10 aa, synthetic construct
TWVRGDRTNL

SEQ ID NO: 139870 - protein, 10 aa, synthetic construct
TWPRGDRTNL

SEQ ID NO: 139871 - protein, 10 aa, synthetic construct
TWLRGDRTNL

SEQ ID NO: 139872 - protein, 10 aa, synthetic construct
TWIRGDRTNL

SEQ ID NO: 139873 - protein, 10 aa, synthetic construct
TWMRGDRTNL

SEQ ID NO: 139874 - protein, 10 aa, synthetic construct
TWWRGDRTNL

SEQ ID NO: 139875 - protein, 10 aa, synthetic construct
TWFRGDRTNL

SEQ ID NO: 139876 - protein, 10 aa, synthetic construct
TWKRGDRTNL

SEQ ID NO: 139877 - protein, 10 aa, synthetic construct
TWRRGDRTNL

SEQ ID NO: 139878 - protein, 10 aa, synthetic construct
TWHRGDRTNL

SEQ ID NO: 139879 - protein, 10 aa, synthetic construct
TWSRGDRTNL

SEQ ID NO: 139880 - protein, 10 aa, synthetic construct
TWTRGDRTNL

SEQ ID NO: 139881 - protein, 10 aa, synthetic construct
TWYRGDRTNL

SEQ ID NO: 139882 - protein, 10 aa, synthetic construct
TWNRGDRTNL

SEQ ID NO: 139883 - protein, 10 aa, synthetic construct
TWQRGDRTNL

SEQ ID NO: 139884 - protein, 10 aa, synthetic construct
TWDRGDRTNL

SEQ ID NO: 139885 - protein, 10 aa, synthetic construct
TWERGDRTNL

SEQ ID NO: 139886 - protein, 10 aa, synthetic construct
TFGRGDRTNL

SEQ ID NO: 139887 - protein, 10 aa, synthetic construct
TFARGDRTNL

SEQ ID NO: 139888 - protein, 10 aa, synthetic construct
TFVRGDRTNL

SEQ ID NO: 139889 - protein, 10 aa, synthetic construct
TFPRGDRTNL

SEQ ID NO: 139890 - protein, 10 aa, synthetic construct
TFLRGDRTNL

SEQ ID NO: 139891 - protein, 10 aa, synthetic construct
TFIRGDRTNL

SEQ ID NO: 139892 - protein, 10 aa, synthetic construct
TFMRGDRTNL

SEQ ID NO: 139893 - protein, 10 aa, synthetic construct
TFWRGDRTNL

SEQ ID NO: 139894 - protein, 10 aa, synthetic construct
TFFRGDRTNL

SEQ ID NO: 139895 - protein, 10 aa, synthetic construct
TFKRGDRTNL

SEQ ID NO: 139896 - protein, 10 aa, synthetic construct
TFRRGDRTNL

SEQ ID NO: 139897 - protein, 10 aa, synthetic construct
TFHRGDRTNL

SEQ ID NO: 139898 - protein, 10 aa, synthetic construct
TFSRGDRTNL

SEQ ID NO: 139899 - protein, 10 aa, synthetic construct
TFTRGDRTNL

SEQ ID NO: 139900 - protein, 10 aa, synthetic construct
TFYRGDRTNL

SEQ ID NO: 139901 - protein, 10 aa, synthetic construct
TFNRGDRTNL

SEQ ID NO: 139902 - protein, 10 aa, synthetic construct
TFQRGDRTNL

SEQ ID NO: 139903 - protein, 10 aa, synthetic construct
TFDRGDRTNL

SEQ ID NO: 139904 - protein, 10 aa, synthetic construct
TFERGDRTNL

SEQ ID NO: 139905 - protein, 10 aa, synthetic construct
TKGRGDRTNL

SEQ ID NO: 139906 - protein, 10 aa, synthetic construct
TKARGDRTNL

SEQ ID NO: 139907 - protein, 10 aa, synthetic construct
TKVRGDRTNL

SEQ ID NO: 139908 - protein, 10 aa, synthetic construct
TKPRGDRTNL

SEQ ID NO: 139909 - protein, 10 aa, synthetic construct
TKLRGDRTNL

SEQ ID NO: 139910 - protein, 10 aa, synthetic construct
TKIRGDRTNL

SEQ ID NO: 139911 - protein, 10 aa, synthetic construct
TKMRGDRTNL

SEQ ID NO: 139912 - protein, 10 aa, synthetic construct
TKWRGDRTNL

SEQ ID NO: 139913 - protein, 10 aa, synthetic construct
TKFRGDRTNL

SEQ ID NO: 139914 - protein, 10 aa, synthetic construct
TKKRGDRTNL

SEQ ID NO: 139915 - protein, 10 aa, synthetic construct
TKRRGDRTNL

SEQ ID NO: 139916 - protein, 10 aa, synthetic construct
TKHRGDRTNL

SEQ ID NO: 139917 - protein, 10 aa, synthetic construct
TKSRGDRTNL

SEQ ID NO: 139918 - protein, 10 aa, synthetic construct
TKTRGDRTNL

SEQ ID NO: 139919 - protein, 10 aa, synthetic construct
TKYRGDRTNL

SEQ ID NO: 139920 - protein, 10 aa, synthetic construct
TKNRGDRTNL

SEQ ID NO: 139921 - protein, 10 aa, synthetic construct
TKQRGDRTNL

SEQ ID NO: 139922 - protein, 10 aa, synthetic construct
TKDRGDRTNL

SEQ ID NO: 139923 - protein, 10 aa, synthetic construct
TKERGDRTNL

SEQ ID NO: 139924 - protein, 10 aa, synthetic construct
TRGRGDRTNL

SEQ ID NO: 139925 - protein, 10 aa, synthetic construct
TRARGDRTNL

SEQ ID NO: 139926 - protein, 10 aa, synthetic construct
TRVRGDRTNL

SEQ ID NO: 139927 - protein, 10 aa, synthetic construct
TRPRGDRTNL

SEQ ID NO: 139928 - protein, 10 aa, synthetic construct
TRLRGDRTNL

SEQ ID NO: 139929 - protein, 10 aa, synthetic construct
TRIRGDRTNL

SEQ ID NO: 139930 - protein, 10 aa, synthetic construct
TRMRGDRTNL

SEQ ID NO: 139931 - protein, 10 aa, synthetic construct
TRWRGDRTNL

SEQ ID NO: 139932 - protein, 10 aa, synthetic construct
TRFRGDRTNL

SEQ ID NO: 139933 - protein, 10 aa, synthetic construct
TRKRGDRTNL

SEQ ID NO: 139934 - protein, 10 aa, synthetic construct
TRRRGDRTNL

SEQ ID NO: 139935 - protein, 10 aa, synthetic construct
TRHRGDRTNL

SEQ ID NO: 139936 - protein, 10 aa, synthetic construct
TRSRGDRTNL

SEQ ID NO: 139937 - protein, 10 aa, synthetic construct
TRTRGDRTNL

SEQ ID NO: 139938 - protein, 10 aa, synthetic construct
TRYRGDRTNL

SEQ ID NO: 139939 - protein, 10 aa, synthetic construct
TRNRGDRTNL

SEQ ID NO: 139940 - protein, 10 aa, synthetic construct
TRQRGDRTNL

SEQ ID NO: 139941 - protein, 10 aa, synthetic construct
TRDRGDRTNL

SEQ ID NO: 139942 - protein, 10 aa, synthetic construct
TRERGDRTNL

SEQ ID NO: 139943 - protein, 10 aa, synthetic construct
THGRGDRTNL

SEQ ID NO: 139944 - protein, 10 aa, synthetic construct
THARGDRTNL

SEQ ID NO: 139945 - protein, 10 aa, synthetic construct
THVRGDRTNL

SEQ ID NO: 139946 - protein, 10 aa, synthetic construct
THPRGDRTNL

SEQ ID NO: 139947 - protein, 10 aa, synthetic construct
THLRGDRTNL

SEQ ID NO: 139948 - protein, 10 aa, synthetic construct
THIRGDRTNL

SEQ ID NO: 139949 - protein, 10 aa, synthetic construct
THMRGDRTNL

SEQ ID NO: 139950 - protein, 10 aa, synthetic construct
THWRGDRTNL

SEQ ID NO: 139951 - protein, 10 aa, synthetic construct
THFRGDRTNL

SEQ ID NO: 139952 - protein, 10 aa, synthetic construct
THKRGDRTNL

SEQ ID NO: 139953 - protein, 10 aa, synthetic construct
THRRGDRTNL

SEQ ID NO: 139954 - protein, 10 aa, synthetic construct
THHRGDRTNL

SEQ ID NO: 139955 - protein, 10 aa, synthetic construct
THSRGDRTNL

SEQ ID NO: 139956 - protein, 10 aa, synthetic construct
THTRGDRTNL

SEQ ID NO: 139957 - protein, 10 aa, synthetic construct
THYRGDRTNL

SEQ ID NO: 139958 - protein, 10 aa, synthetic construct
THNRGDRTNL

SEQ ID NO: 139959 - protein, 10 aa, synthetic construct
THQRGDRTNL

SEQ ID NO: 139960 - protein, 10 aa, synthetic construct
THDRGDRTNL

SEQ ID NO: 139961 - protein, 10 aa, synthetic construct
THERGDRTNL

SEQ ID NO: 139962 - protein, 10 aa, synthetic construct
TSGRGDRTNL

SEQ ID NO: 139963 - protein, 10 aa, synthetic construct
TSARGDRTNL

SEQ ID NO: 139964 - protein, 10 aa, synthetic construct
TSVRGDRTNL

SEQ ID NO: 139965 - protein, 10 aa, synthetic construct
TSPRGDRTNL

SEQ ID NO: 139966 - protein, 10 aa, synthetic construct
TSLRGDRTNL

SEQ ID NO: 139967 - protein, 10 aa, synthetic construct
TSIRGDRTNL

SEQ ID NO: 139968 - protein, 10 aa, synthetic construct
TSMRGDRTNL

SEQ ID NO: 139969 - protein, 10 aa, synthetic construct
TSWRGDRTNL

SEQ ID NO: 139970 - protein, 10 aa, synthetic construct
TSFRGDRTNL

SEQ ID NO: 139971 - protein, 10 aa, synthetic construct
TSKRGDRTNL

SEQ ID NO: 139972 - protein, 10 aa, synthetic construct
TSRRGDRTNL

SEQ ID NO: 139973 - protein, 10 aa, synthetic construct
TSHRGDRTNL

SEQ ID NO: 139974 - protein, 10 aa, synthetic construct
TSSRGDRTNL

SEQ ID NO: 139975 - protein, 10 aa, synthetic construct
TSTRGDRTNL

SEQ ID NO: 139976 - protein, 10 aa, synthetic construct
TSYRGDRTNL

SEQ ID NO: 139977 - protein, 10 aa, synthetic construct
TSNRGDRTNL

SEQ ID NO: 139978 - protein, 10 aa, synthetic construct
TSQRGDRTNL

SEQ ID NO: 139979 - protein, 10 aa, synthetic construct
TSDRGDRTNL

SEQ ID NO: 139980 - protein, 10 aa, synthetic construct
TSERGDRTNL

SEQ ID NO: 139981 - protein, 10 aa, synthetic construct
TTGRGDRTNL

SEQ ID NO: 139982 - protein, 10 aa, synthetic construct
TTARGDRTNL

SEQ ID NO: 139983 - protein, 10 aa, synthetic construct
TTVRGDRTNL

SEQ ID NO: 139984 - protein, 10 aa, synthetic construct
TTPRGDRTNL

SEQ ID NO: 139985 - protein, 10 aa, synthetic construct
TTLRGDRTNL

SEQ ID NO: 139986 - protein, 10 aa, synthetic construct
TTIRGDRTNL

SEQ ID NO: 139987 - protein, 10 aa, synthetic construct
TTMRGDRTNL

SEQ ID NO: 139988 - protein, 10 aa, synthetic construct
TTWRGDRTNL

SEQ ID NO: 139989 - protein, 10 aa, synthetic construct
TTFRGDRTNL

SEQ ID NO: 139990 - protein, 10 aa, synthetic construct
TTKRGDRTNL

SEQ ID NO: 139991 - protein, 10 aa, synthetic construct
TTRRGDRTNL

SEQ ID NO: 139992 - protein, 10 aa, synthetic construct
TTHRGDRTNL

SEQ ID NO: 139993 - protein, 10 aa, synthetic construct
TTSRGDRTNL

SEQ ID NO: 139994 - protein, 10 aa, synthetic construct
TTTRGDRTNL

SEQ ID NO: 139995 - protein, 10 aa, synthetic construct
TTYRGDRTNL

SEQ ID NO: 139996 - protein, 10 aa, synthetic construct
TTNRGDRTNL

SEQ ID NO: 139997 - protein, 10 aa, synthetic construct
TTQRGDRTNL

SEQ ID NO: 139998 - protein, 10 aa, synthetic construct
TTDRGDRTNL

SEQ ID NO: 139999 - protein, 10 aa, synthetic construct
TTERGDRTNL

SEQ ID NO: 140000 - protein, 10 aa, synthetic construct
TYGRGDRTNL

SEQ ID NO: 140001 - protein, 10 aa, synthetic construct
TYARGDRTNL

SEQ ID NO: 140002 - protein, 10 aa, synthetic construct
TYVRGDRTNL

SEQ ID NO: 140003 - protein, 10 aa, synthetic construct
TYPRGDRTNL

SEQ ID NO: 140004 - protein, 10 aa, synthetic construct
TYLRGDRTNL

SEQ ID NO: 140005 - protein, 10 aa, synthetic construct
TYIRGDRTNL

SEQ ID NO: 140006 - protein, 10 aa, synthetic construct
TYMRGDRTNL

SEQ ID NO: 140007 - protein, 10 aa, synthetic construct
TYWRGDRTNL

SEQ ID NO: 140008 - protein, 10 aa, synthetic construct
TYFRGDRTNL

SEQ ID NO: 140009 - protein, 10 aa, synthetic construct
TYKRGDRTNL

SEQ ID NO: 140010 - protein, 10 aa, synthetic construct
TYRRGDRTNL

SEQ ID NO: 140011 - protein, 10 aa, synthetic construct
TYHRGDRTNL

SEQ ID NO: 140012 - protein, 10 aa, synthetic construct
TYSRGDRTNL

SEQ ID NO: 140013 - protein, 10 aa, synthetic construct
TYTRGDRTNL

SEQ ID NO: 140014 - protein, 10 aa, synthetic construct
TYYRGDRTNL

SEQ ID NO: 140015 - protein, 10 aa, synthetic construct
TYNRGDRTNL

SEQ ID NO: 140016 - protein, 10 aa, synthetic construct
TYQRGDRTNL

SEQ ID NO: 140017 - protein, 10 aa, synthetic construct
TYDRGDRTNL

SEQ ID NO: 140018 - protein, 10 aa, synthetic construct
TYERGDRTNL

SEQ ID NO: 140019 - protein, 10 aa, synthetic construct
TNGRGDRTNL

SEQ ID NO: 140020 - protein, 10 aa, synthetic construct
TNARGDRTNL

SEQ ID NO: 140021 - protein, 10 aa, synthetic construct
TNVRGDRTNL

SEQ ID NO: 140022 - protein, 10 aa, synthetic construct
TNPRGDRTNL

SEQ ID NO: 140023 - protein, 10 aa, synthetic construct
TNLRGDRTNL

SEQ ID NO: 140024 - protein, 10 aa, synthetic construct
TNIRGDRTNL

SEQ ID NO: 140025 - protein, 10 aa, synthetic construct
TNMRGDRTNL

SEQ ID NO: 140026 - protein, 10 aa, synthetic construct
TNWRGDRTNL

SEQ ID NO: 140027 - protein, 10 aa, synthetic construct
TNFRGDRTNL

SEQ ID NO: 140028 - protein, 10 aa, synthetic construct
TNKRGDRTNL

SEQ ID NO: 140029 - protein, 10 aa, synthetic construct
TNRRGDRTNL

SEQ ID NO: 140030 - protein, 10 aa, synthetic construct
TNHRGDRTNL

SEQ ID NO: 140031 - protein, 10 aa, synthetic construct
TNSRGDRTNL

SEQ ID NO: 140032 - protein, 10 aa, synthetic construct
TNTRGDRTNL

SEQ ID NO: 140033 - protein, 10 aa, synthetic construct
TNYRGDRTNL

SEQ ID NO: 140034 - protein, 10 aa, synthetic construct
TNNRGDRTNL

SEQ ID NO: 140035 - protein, 10 aa, synthetic construct
TNQRGDRTNL

SEQ ID NO: 140036 - protein, 10 aa, synthetic construct
TNDRGDRTNL

SEQ ID NO: 140037 - protein, 10 aa, synthetic construct
TNERGDRTNL

SEQ ID NO: 140038 - protein, 10 aa, synthetic construct
TQGRGDRTNL

SEQ ID NO: 140039 - protein, 10 aa, synthetic construct
TQARGDRTNL

SEQ ID NO: 140040 - protein, 10 aa, synthetic construct
TQVRGDRTNL

SEQ ID NO: 140041 - protein, 10 aa, synthetic construct
TQPRGDRTNL

SEQ ID NO: 140042 - protein, 10 aa, synthetic construct
TQLRGDRTNL

SEQ ID NO: 140043 - protein, 10 aa, synthetic construct
TQIRGDRTNL

SEQ ID NO: 140044 - protein, 10 aa, synthetic construct
TQMRGDRTNL

SEQ ID NO: 140045 - protein, 10 aa, synthetic construct
TQWRGDRTNL

SEQ ID NO: 140046 - protein, 10 aa, synthetic construct
TQFRGDRTNL

SEQ ID NO: 140047 - protein, 10 aa, synthetic construct
TQKRGDRTNL

SEQ ID NO: 140048 - protein, 10 aa, synthetic construct
TQRRGDRTNL

SEQ ID NO: 140049 - protein, 10 aa, synthetic construct
TQHRGDRTNL

SEQ ID NO: 140050 - protein, 10 aa, synthetic construct
TQSRGDRTNL

SEQ ID NO: 140051 - protein, 10 aa, synthetic construct
TQTRGDRTNL

SEQ ID NO: 140052 - protein, 10 aa, synthetic construct
TQYRGDRTNL

SEQ ID NO: 140053 - protein, 10 aa, synthetic construct
TQNRGDRTNL

SEQ ID NO: 140054 - protein, 10 aa, synthetic construct
TQQRGDRTNL

SEQ ID NO: 140055 - protein, 10 aa, synthetic construct
TQDRGDRTNL

SEQ ID NO: 140056 - protein, 10 aa, synthetic construct
TQERGDRTNL

SEQ ID NO: 140057 - protein, 10 aa, synthetic construct
TDGRGDRTNL

SEQ ID NO: 140058 - protein, 10 aa, synthetic construct
TDARGDRTNL

SEQ ID NO: 140059 - protein, 10 aa, synthetic construct
TDVRGDRTNL

SEQ ID NO: 140060 - protein, 10 aa, synthetic construct
TDPRGDRTNL

SEQ ID NO: 140061 - protein, 10 aa, synthetic construct
TDLRGDRTNL

SEQ ID NO: 140062 - protein, 10 aa, synthetic construct
TDIRGDRTNL

SEQ ID NO: 140063 - protein, 10 aa, synthetic construct
TDMRGDRTNL

SEQ ID NO: 140064 - protein, 10 aa, synthetic construct
TDWRGDRTNL

SEQ ID NO: 140065 - protein, 10 aa, synthetic construct
TDFRGDRTNL

SEQ ID NO: 140066 - protein, 10 aa, synthetic construct
TDKRGDRTNL

SEQ ID NO: 140067 - protein, 10 aa, synthetic construct
TDRRGDRTNL

SEQ ID NO: 140068 - protein, 10 aa, synthetic construct
TDHRGDRTNL

SEQ ID NO: 140069 - protein, 10 aa, synthetic construct
TDSRGDRTNL

SEQ ID NO: 140070 - protein, 10 aa, synthetic construct
TDTRGDRTNL

SEQ ID NO: 140071 - protein, 10 aa, synthetic construct
TDYRGDRTNL

SEQ ID NO: 140072 - protein, 10 aa, synthetic construct
TDNRGDRTNL

SEQ ID NO: 140073 - protein, 10 aa, synthetic construct
TDQRGDRTNL

SEQ ID NO: 140074 - protein, 10 aa, synthetic construct
TDDRGDRTNL

SEQ ID NO: 140075 - protein, 10 aa, synthetic construct
TDERGDRTNL

SEQ ID NO: 140076 - protein, 10 aa, synthetic construct
TEGRGDRTNL

SEQ ID NO: 140077 - protein, 10 aa, synthetic construct
TEARGDRTNL

SEQ ID NO: 140078 - protein, 10 aa, synthetic construct
TEVRGDRTNL

SEQ ID NO: 140079 - protein, 10 aa, synthetic construct
TEPRGDRTNL

SEQ ID NO: 140080 - protein, 10 aa, synthetic construct
TELRGDRTNL

SEQ ID NO: 140081 - protein, 10 aa, synthetic construct
TEIRGDRTNL

SEQ ID NO: 140082 - protein, 10 aa, synthetic construct
TEMRGDRTNL

SEQ ID NO: 140083 - protein, 10 aa, synthetic construct
TEWRGDRTNL

SEQ ID NO: 140084 - protein, 10 aa, synthetic construct
TEFRGDRTNL

SEQ ID NO: 140085 - protein, 10 aa, synthetic construct
TEKRGDRTNL

SEQ ID NO: 140086 - protein, 10 aa, synthetic construct
TERRGDRTNL

SEQ ID NO: 140087 - protein, 10 aa, synthetic construct
TEHRGDRTNL

SEQ ID NO: 140088 - protein, 10 aa, synthetic construct
TESRGDRTNL

SEQ ID NO: 140089 - protein, 10 aa, synthetic construct
TETRGDRTNL

SEQ ID NO: 140090 - protein, 10 aa, synthetic construct
TEYRGDRTNL

SEQ ID NO: 140091 - protein, 10 aa, synthetic construct
TENRGDRTNL

SEQ ID NO: 140092 - protein, 10 aa, synthetic construct
TEQRGDRTNL

SEQ ID NO: 140093 - protein, 10 aa, synthetic construct
TEDRGDRTNL

SEQ ID NO: 140094 - protein, 10 aa, synthetic construct
TEERGDRTNL

SEQ ID NO: 140095 - protein, 10 aa, synthetic construct
AGGRGDRTNL

SEQ ID NO: 140096 - protein, 10 aa, synthetic construct
AGARGDRTNL

SEQ ID NO: 140097 - protein, 10 aa, synthetic construct
AGVRGDRTNL

SEQ ID NO: 140098 - protein, 10 aa, synthetic construct
AGPRGDRTNL

SEQ ID NO: 140099 - protein, 10 aa, synthetic construct
AGLRGDRTNL

SEQ ID NO: 140100 - protein, 10 aa, synthetic construct
AGIRGDRTNL

SEQ ID NO: 140101 - protein, 10 aa, synthetic construct
AGMRGDRTNL

SEQ ID NO: 140102 - protein, 10 aa, synthetic construct
AGWRGDRTNL

SEQ ID NO: 140103 - protein, 10 aa, synthetic construct
AGFRGDRTNL

SEQ ID NO: 140104 - protein, 10 aa, synthetic construct
AGKRGDRTNL

SEQ ID NO: 140105 - protein, 10 aa, synthetic construct
AGRRGDRTNL

SEQ ID NO: 140106 - protein, 10 aa, synthetic construct
AGHRGDRTNL

SEQ ID NO: 140107 - protein, 10 aa, synthetic construct
AGSRGDRTNL

SEQ ID NO: 140108 - protein, 10 aa, synthetic construct
AGTRGDRTNL

SEQ ID NO: 140109 - protein, 10 aa, synthetic construct
AGYRGDRTNL

SEQ ID NO: 140110 - protein, 10 aa, synthetic construct
AGNRGDRTNL

SEQ ID NO: 140111 - protein, 10 aa, synthetic construct
AGQRGDRTNL

SEQ ID NO: 140112 - protein, 10 aa, synthetic construct
AGDRGDRTNL

SEQ ID NO: 140113 - protein, 10 aa, synthetic construct
AGERGDRTNL

SEQ ID NO: 140114 - protein, 10 aa, synthetic construct
AAGRGDRTNL

SEQ ID NO: 140115 - protein, 10 aa, synthetic construct
AAARGDRTNL

SEQ ID NO: 140116 - protein, 10 aa, synthetic construct
AAVRGDRTNL

SEQ ID NO: 140117 - protein, 10 aa, synthetic construct
AAPRGDRTNL

SEQ ID NO: 140118 - protein, 10 aa, synthetic construct
AALRGDRTNL

SEQ ID NO: 140119 - protein, 10 aa, synthetic construct
AAIRGDRTNL

SEQ ID NO: 140120 - protein, 10 aa, synthetic construct
AAMRGDRTNL

SEQ ID NO: 140121 - protein, 10 aa, synthetic construct
AAWRGDRTNL

SEQ ID NO: 140122 - protein, 10 aa, synthetic construct
AAFRGDRTNL

SEQ ID NO: 140123 - protein, 10 aa, synthetic construct
AAKRGDRTNL

SEQ ID NO: 140124 - protein, 10 aa, synthetic construct
AARRGDRTNL

SEQ ID NO: 140125 - protein, 10 aa, synthetic construct
AAHRGDRTNL

SEQ ID NO: 140126 - protein, 10 aa, synthetic construct
AASRGDRTNL

SEQ ID NO: 140127 - protein, 10 aa, synthetic construct
AATRGDRTNL

SEQ ID NO: 140128 - protein, 10 aa, synthetic construct
AAYRGDRTNL

SEQ ID NO: 140129 - protein, 10 aa, synthetic construct
AANRGDRTNL

SEQ ID NO: 140130 - protein, 10 aa, synthetic construct
AAQRGDRTNL

SEQ ID NO: 140131 - protein, 10 aa, synthetic construct
AADRGDRTNL

SEQ ID NO: 140132 - protein, 10 aa, synthetic construct
AAERGDRTNL

SEQ ID NO: 140133 - protein, 10 aa, synthetic construct
AVGRGDRTNL

SEQ ID NO: 140134 - protein, 10 aa, synthetic construct
AVARGDRTNL

SEQ ID NO: 140135 - protein, 10 aa, synthetic construct
AVVRGDRTNL

SEQ ID NO: 140136 - protein, 10 aa, synthetic construct
AVPRGDRTNL

SEQ ID NO: 140137 - protein, 10 aa, synthetic construct
AVLRGDRTNL

SEQ ID NO: 140138 - protein, 10 aa, synthetic construct
AVIRGDRTNL

SEQ ID NO: 140139 - protein, 10 aa, synthetic construct
AVMRGDRTNL

SEQ ID NO: 140140 - protein, 10 aa, synthetic construct
AVWRGDRTNL

SEQ ID NO: 140141 - protein, 10 aa, synthetic construct
AVFRGDRTNL

SEQ ID NO: 140142 - protein, 10 aa, synthetic construct
AVKRGDRTNL

SEQ ID NO: 140143 - protein, 10 aa, synthetic construct
AVRRGDRTNL

SEQ ID NO: 140144 - protein, 10 aa, synthetic construct
AVHRGDRTNL

SEQ ID NO: 140145 - protein, 10 aa, synthetic construct
AVSRGDRTNL

SEQ ID NO: 140146 - protein, 10 aa, synthetic construct
AVTRGDRTNL

SEQ ID NO: 140147 - protein, 10 aa, synthetic construct
AVYRGDRTNL

SEQ ID NO: 140148 - protein, 10 aa, synthetic construct
AVNRGDRTNL

SEQ ID NO: 140149 - protein, 10 aa, synthetic construct
AVQRGDRTNL

SEQ ID NO: 140150 - protein, 10 aa, synthetic construct
AVDRGDRTNL

SEQ ID NO: 140151 - protein, 10 aa, synthetic construct
AVERGDRTNL

SEQ ID NO: 140152 - protein, 10 aa, synthetic construct
APGRGDRTNL

SEQ ID NO: 140153 - protein, 10 aa, synthetic construct
APARGDRTNL

SEQ ID NO: 140154 - protein, 10 aa, synthetic construct
APVRGDRTNL

SEQ ID NO: 140155 - protein, 10 aa, synthetic construct
APPRGDRTNL

SEQ ID NO: 140156 - protein, 10 aa, synthetic construct
APLRGDRTNL

SEQ ID NO: 140157 - protein, 10 aa, synthetic construct
APIRGDRTNL

SEQ ID NO: 140158 - protein, 10 aa, synthetic construct
APMRGDRTNL

SEQ ID NO: 140159 - protein, 10 aa, synthetic construct
APWRGDRTNL

SEQ ID NO: 140160 - protein, 10 aa, synthetic construct
APFRGDRTNL

SEQ ID NO: 140161 - protein, 10 aa, synthetic construct
APKRGDRTNL

SEQ ID NO: 140162 - protein, 10 aa, synthetic construct
APRRGDRTNL

SEQ ID NO: 140163 - protein, 10 aa, synthetic construct
APHRGDRTNL

SEQ ID NO: 140164 - protein, 10 aa, synthetic construct
APSRGDRTNL

SEQ ID NO: 140165 - protein, 10 aa, synthetic construct
APTRGDRTNL

SEQ ID NO: 140166 - protein, 10 aa, synthetic construct
APYRGDRTNL

SEQ ID NO: 140167 - protein, 10 aa, synthetic construct
APNRGDRTNL

SEQ ID NO: 140168 - protein, 10 aa, synthetic construct
APQRGDRTNL

SEQ ID NO: 140169 - protein, 10 aa, synthetic construct
APDRGDRTNL

SEQ ID NO: 140170 - protein, 10 aa, synthetic construct
APERGDRTNL

SEQ ID NO: 140171 - protein, 10 aa, synthetic construct
ALGRGDRTNL

SEQ ID NO: 140172 - protein, 10 aa, synthetic construct
ALARGDRTNL

SEQ ID NO: 140173 - protein, 10 aa, synthetic construct
ALVRGDRTNL

SEQ ID NO: 140174 - protein, 10 aa, synthetic construct
ALPRGDRTNL

SEQ ID NO: 140175 - protein, 10 aa, synthetic construct
ALLRGDRTNL

SEQ ID NO: 140176 - protein, 10 aa, synthetic construct
ALIRGDRTNL

SEQ ID NO: 140177 - protein, 10 aa, synthetic construct
ALMRGDRTNL

SEQ ID NO: 140178 - protein, 10 aa, synthetic construct
ALWRGDRTNL

SEQ ID NO: 140179 - protein, 10 aa, synthetic construct
ALFRGDRTNL

SEQ ID NO: 140180 - protein, 10 aa, synthetic construct
ALKRGDRTNL

SEQ ID NO: 140181 - protein, 10 aa, synthetic construct
ALRRGDRTNL

SEQ ID NO: 140182 - protein, 10 aa, synthetic construct
ALHRGDRTNL

SEQ ID NO: 140183 - protein, 10 aa, synthetic construct
ALSRGDRTNL

SEQ ID NO: 140184 - protein, 10 aa, synthetic construct
ALTRGDRTNL

SEQ ID NO: 140185 - protein, 10 aa, synthetic construct
ALYRGDRTNL

SEQ ID NO: 140186 - protein, 10 aa, synthetic construct
ALNRGDRTNL

SEQ ID NO: 140187 - protein, 10 aa, synthetic construct
ALQRGDRTNL

SEQ ID NO: 140188 - protein, 10 aa, synthetic construct
ALDRGDRTNL

SEQ ID NO: 140189 - protein, 10 aa, synthetic construct
ALERGDRTNL

SEQ ID NO: 140190 - protein, 10 aa, synthetic construct
AIGRGDRTNL

SEQ ID NO: 140191 - protein, 10 aa, synthetic construct
AIARGDRTNL

SEQ ID NO: 140192 - protein, 10 aa, synthetic construct
AIVRGDRTNL

SEQ ID NO: 140193 - protein, 10 aa, synthetic construct
AIPRGDRTNL

SEQ ID NO: 140194 - protein, 10 aa, synthetic construct
AILRGDRTNL

SEQ ID NO: 140195 - protein, 10 aa, synthetic construct
AIIRGDRTNL

SEQ ID NO: 140196 - protein, 10 aa, synthetic construct
AIMRGDRTNL

SEQ ID NO: 140197 - protein, 10 aa, synthetic construct
AIWRGDRTNL

SEQ ID NO: 140198 - protein, 10 aa, synthetic construct
AIFRGDRTNL

SEQ ID NO: 140199 - protein, 10 aa, synthetic construct
AIKRGDRTNL

SEQ ID NO: 140200 - protein, 10 aa, synthetic construct
AIRRGDRTNL

SEQ ID NO: 140201 - protein, 10 aa, synthetic construct
AIHRGDRTNL

SEQ ID NO: 140202 - protein, 10 aa, synthetic construct
AISRGDRTNL

SEQ ID NO: 140203 - protein, 10 aa, synthetic construct
AITRGDRTNL

SEQ ID NO: 140204 - protein, 10 aa, synthetic construct
AIYRGDRTNL

SEQ ID NO: 140205 - protein, 10 aa, synthetic construct
AINRGDRTNL

SEQ ID NO: 140206 - protein, 10 aa, synthetic construct
AIQRGDRTNL

SEQ ID NO: 140207 - protein, 10 aa, synthetic construct
AIDRGDRTNL

SEQ ID NO: 140208 - protein, 10 aa, synthetic construct
AIERGDRTNL

SEQ ID NO: 140209 - protein, 10 aa, synthetic construct
AMGRGDRTNL

SEQ ID NO: 140210 - protein, 10 aa, synthetic construct
AMARGDRTNL

SEQ ID NO: 140211 - protein, 10 aa, synthetic construct
AMVRGDRTNL

SEQ ID NO: 140212 - protein, 10 aa, synthetic construct
AMPRGDRTNL

SEQ ID NO: 140213 - protein, 10 aa, synthetic construct
AMLRGDRTNL

SEQ ID NO: 140214 - protein, 10 aa, synthetic construct
AMIRGDRTNL

SEQ ID NO: 140215 - protein, 10 aa, synthetic construct
AMMRGDRTNL

SEQ ID NO: 140216 - protein, 10 aa, synthetic construct
AMWRGDRTNL

SEQ ID NO: 140217 - protein, 10 aa, synthetic construct
AMFRGDRTNL

SEQ ID NO: 140218 - protein, 10 aa, synthetic construct
AMKRGDRTNL

SEQ ID NO: 140219 - protein, 10 aa, synthetic construct
AMRRGDRTNL

SEQ ID NO: 140220 - protein, 10 aa, synthetic construct
AMHRGDRTNL

SEQ ID NO: 140221 - protein, 10 aa, synthetic construct
AMSRGDRTNL

SEQ ID NO: 140222 - protein, 10 aa, synthetic construct
AMTRGDRTNL

SEQ ID NO: 140223 - protein, 10 aa, synthetic construct
AMYRGDRTNL

SEQ ID NO: 140224 - protein, 10 aa, synthetic construct
AMNRGDRTNL

SEQ ID NO: 140225 - protein, 10 aa, synthetic construct
AMQRGDRTNL

SEQ ID NO: 140226 - protein, 10 aa, synthetic construct
AMDRGDRTNL

SEQ ID NO: 140227 - protein, 10 aa, synthetic construct
AMERGDRTNL

SEQ ID NO: 140228 - protein, 10 aa, synthetic construct
AWGRGDRTNL

SEQ ID NO: 140229 - protein, 10 aa, synthetic construct
AWARGDRTNL

SEQ ID NO: 140230 - protein, 10 aa, synthetic construct
AWVRGDRTNL

SEQ ID NO: 140231 - protein, 10 aa, synthetic construct
AWPRGDRTNL

SEQ ID NO: 140232 - protein, 10 aa, synthetic construct
AWLRGDRTNL

SEQ ID NO: 140233 - protein, 10 aa, synthetic construct
AWIRGDRTNL

SEQ ID NO: 140234 - protein, 10 aa, synthetic construct
AWMRGDRTNL

SEQ ID NO: 140235 - protein, 10 aa, synthetic construct
AWWRGDRTNL

SEQ ID NO: 140236 - protein, 10 aa, synthetic construct
AWFRGDRTNL

SEQ ID NO: 140237 - protein, 10 aa, synthetic construct
AWKRGDRTNL

SEQ ID NO: 140238 - protein, 10 aa, synthetic construct
AWRRGDRTNL

SEQ ID NO: 140239 - protein, 10 aa, synthetic construct
AWHRGDRTNL

SEQ ID NO: 140240 - protein, 10 aa, synthetic construct
AWSRGDRTNL

SEQ ID NO: 140241 - protein, 10 aa, synthetic construct
AWTRGDRTNL

SEQ ID NO: 140242 - protein, 10 aa, synthetic construct
AWYRGDRTNL

SEQ ID NO: 140243 - protein, 10 aa, synthetic construct
AWNRGDRTNL

SEQ ID NO: 140244 - protein, 10 aa, synthetic construct
AWQRGDRTNL

SEQ ID NO: 140245 - protein, 10 aa, synthetic construct
AWDRGDRTNL

SEQ ID NO: 140246 - protein, 10 aa, synthetic construct
AWERGDRTNL

SEQ ID NO: 140247 - protein, 10 aa, synthetic construct
AFGRGDRTNL

SEQ ID NO: 140248 - protein, 10 aa, synthetic construct
AFARGDRTNL

SEQ ID NO: 140249 - protein, 10 aa, synthetic construct
AFVRGDRTNL

SEQ ID NO: 140250 - protein, 10 aa, synthetic construct
AFPRGDRTNL

SEQ ID NO: 140251 - protein, 10 aa, synthetic construct
AFLRGDRTNL

SEQ ID NO: 140252 - protein, 10 aa, synthetic construct
AFIRGDRTNL

SEQ ID NO: 140253 - protein, 10 aa, synthetic construct
AFMRGDRTNL

SEQ ID NO: 140254 - protein, 10 aa, synthetic construct
AFWRGDRTNL

SEQ ID NO: 140255 - protein, 10 aa, synthetic construct
AFFRGDRTNL

SEQ ID NO: 140256 - protein, 10 aa, synthetic construct
AFKRGDRTNL

SEQ ID NO: 140257 - protein, 10 aa, synthetic construct
AFRRGDRTNL

SEQ ID NO: 140258 - protein, 10 aa, synthetic construct
AFHRGDRTNL

SEQ ID NO: 140259 - protein, 10 aa, synthetic construct
AFSRGDRTNL

SEQ ID NO: 140260 - protein, 10 aa, synthetic construct
AFTRGDRTNL

SEQ ID NO: 140261 - protein, 10 aa, synthetic construct
AFYRGDRTNL

SEQ ID NO: 140262 - protein, 10 aa, synthetic construct
AFNRGDRTNL

SEQ ID NO: 140263 - protein, 10 aa, synthetic construct
AFQRGDRTNL

SEQ ID NO: 140264 - protein, 10 aa, synthetic construct
AFDRGDRTNL

SEQ ID NO: 140265 - protein, 10 aa, synthetic construct
AFERGDRTNL

SEQ ID NO: 140266 - protein, 10 aa, synthetic construct
AKGRGDRTNL

SEQ ID NO: 140267 - protein, 10 aa, synthetic construct
AKARGDRTNL

SEQ ID NO: 140268 - protein, 10 aa, synthetic construct
AKVRGDRTNL

SEQ ID NO: 140269 - protein, 10 aa, synthetic construct
AKPRGDRTNL

SEQ ID NO: 140270 - protein, 10 aa, synthetic construct
AKLRGDRTNL

SEQ ID NO: 140271 - protein, 10 aa, synthetic construct
AKIRGDRTNL

SEQ ID NO: 140272 - protein, 10 aa, synthetic construct
AKMRGDRTNL

SEQ ID NO: 140273 - protein, 10 aa, synthetic construct
AKWRGDRTNL

SEQ ID NO: 140274 - protein, 10 aa, synthetic construct
AKFRGDRTNL

SEQ ID NO: 140275 - protein, 10 aa, synthetic construct
AKKRGDRTNL

SEQ ID NO: 140276 - protein, 10 aa, synthetic construct
AKRRGDRTNL

SEQ ID NO: 140277 - protein, 10 aa, synthetic construct
AKHRGDRTNL

SEQ ID NO: 140278 - protein, 10 aa, synthetic construct
AKSRGDRTNL

SEQ ID NO: 140279 - protein, 10 aa, synthetic construct
AKTRGDRTNL

SEQ ID NO: 140280 - protein, 10 aa, synthetic construct
AKYRGDRTNL

SEQ ID NO: 140281 - protein, 10 aa, synthetic construct
AKNRGDRTNL

SEQ ID NO: 140282 - protein, 10 aa, synthetic construct
AKQRGDRTNL

SEQ ID NO: 140283 - protein, 10 aa, synthetic construct
AKDRGDRTNL

SEQ ID NO: 140284 - protein, 10 aa, synthetic construct
AKERGDRTNL

SEQ ID NO: 140285 - protein, 10 aa, synthetic construct
ARGRGDRTNL

SEQ ID NO: 140286 - protein, 10 aa, synthetic construct
ARARGDRTNL

SEQ ID NO: 140287 - protein, 10 aa, synthetic construct
ARVRGDRTNL

SEQ ID NO: 140288 - protein, 10 aa, synthetic construct
ARPRGDRTNL

SEQ ID NO: 140289 - protein, 10 aa, synthetic construct
ARLRGDRTNL

SEQ ID NO: 140290 - protein, 10 aa, synthetic construct
ARIRGDRTNL

SEQ ID NO: 140291 - protein, 10 aa, synthetic construct
ARMRGDRTNL

SEQ ID NO: 140292 - protein, 10 aa, synthetic construct
ARWRGDRTNL

SEQ ID NO: 140293 - protein, 10 aa, synthetic construct
ARFRGDRTNL

SEQ ID NO: 140294 - protein, 10 aa, synthetic construct
ARKRGDRTNL

SEQ ID NO: 140295 - protein, 10 aa, synthetic construct
ARRRGDRTNL

SEQ ID NO: 140296 - protein, 10 aa, synthetic construct
ARHRGDRTNL

SEQ ID NO: 140297 - protein, 10 aa, synthetic construct
ARSRGDRTNL

SEQ ID NO: 140298 - protein, 10 aa, synthetic construct
ARTRGDRTNL

SEQ ID NO: 140299 - protein, 10 aa, synthetic construct
ARYRGDRTNL

SEQ ID NO: 140300 - protein, 10 aa, synthetic construct
ARNRGDRTNL

SEQ ID NO: 140301 - protein, 10 aa, synthetic construct
ARQRGDRTNL

SEQ ID NO: 140302 - protein, 10 aa, synthetic construct
ARDRGDRTNL

SEQ ID NO: 140303 - protein, 10 aa, synthetic construct
ARERGDRTNL

SEQ ID NO: 140304 - protein, 10 aa, synthetic construct
AHGRGDRTNL

SEQ ID NO: 140305 - protein, 10 aa, synthetic construct
AHARGDRTNL

SEQ ID NO: 140306 - protein, 10 aa, synthetic construct
AHVRGDRTNL

SEQ ID NO: 140307 - protein, 10 aa, synthetic construct
AHPRGDRTNL

SEQ ID NO: 140308 - protein, 10 aa, synthetic construct
AHLRGDRTNL

SEQ ID NO: 140309 - protein, 10 aa, synthetic construct
AHIRGDRTNL

SEQ ID NO: 140310 - protein, 10 aa, synthetic construct
AHMRGDRTNL

SEQ ID NO: 140311 - protein, 10 aa, synthetic construct
AHWRGDRTNL

SEQ ID NO: 140312 - protein, 10 aa, synthetic construct
AHFRGDRTNL

SEQ ID NO: 140313 - protein, 10 aa, synthetic construct
AHKRGDRTNL

SEQ ID NO: 140314 - protein, 10 aa, synthetic construct
AHRRGDRTNL

SEQ ID NO: 140315 - protein, 10 aa, synthetic construct
AHHRGDRTNL

SEQ ID NO: 140316 - protein, 10 aa, synthetic construct
AHSRGDRTNL

SEQ ID NO: 140317 - protein, 10 aa, synthetic construct
AHTRGDRTNL

SEQ ID NO: 140318 - protein, 10 aa, synthetic construct
AHYRGDRTNL

SEQ ID NO: 140319 - protein, 10 aa, synthetic construct
AHNRGDRTNL

SEQ ID NO: 140320 - protein, 10 aa, synthetic construct
AHQRGDRTNL

SEQ ID NO: 140321 - protein, 10 aa, synthetic construct
AHDRGDRTNL

SEQ ID NO: 140322 - protein, 10 aa, synthetic construct
AHERGDRTNL

SEQ ID NO: 140323 - protein, 10 aa, synthetic construct
ASGRGDRTNL

SEQ ID NO: 140324 - protein, 10 aa, synthetic construct
ASARGDRTNL

SEQ ID NO: 140325 - protein, 10 aa, synthetic construct
ASVRGDRTNL

SEQ ID NO: 140326 - protein, 10 aa, synthetic construct
ASPRGDRTNL

SEQ ID NO: 140327 - protein, 10 aa, synthetic construct
ASLRGDRTNL

SEQ ID NO: 140328 - protein, 10 aa, synthetic construct
ASIRGDRTNL

SEQ ID NO: 140329 - protein, 10 aa, synthetic construct
ASMRGDRTNL

SEQ ID NO: 140330 - protein, 10 aa, synthetic construct
ASWRGDRTNL

SEQ ID NO: 140331 - protein, 10 aa, synthetic construct
ASFRGDRTNL

SEQ ID NO: 140332 - protein, 10 aa, synthetic construct
ASKRGDRTNL

SEQ ID NO: 140333 - protein, 10 aa, synthetic construct
ASRRGDRTNL

SEQ ID NO: 140334 - protein, 10 aa, synthetic construct
ASHRGDRTNL

SEQ ID NO: 140335 - protein, 10 aa, synthetic construct
ASSRGDRTNL

SEQ ID NO: 140336 - protein, 10 aa, synthetic construct
ASTRGDRTNL

SEQ ID NO: 140337 - protein, 10 aa, synthetic construct
ASYRGDRTNL

SEQ ID NO: 140338 - protein, 10 aa, synthetic construct
ASNRGDRTNL

SEQ ID NO: 140339 - protein, 10 aa, synthetic construct
ASQRGDRTNL

SEQ ID NO: 140340 - protein, 10 aa, synthetic construct
ASDRGDRTNL

SEQ ID NO: 140341 - protein, 10 aa, synthetic construct
ASERGDRTNL

SEQ ID NO: 140342 - protein, 10 aa, synthetic construct
ATGRGDRTNL

SEQ ID NO: 140343 - protein, 10 aa, synthetic construct
ATARGDRTNL

SEQ ID NO: 140344 - protein, 10 aa, synthetic construct
ATVRGDRTNL

SEQ ID NO: 140345 - protein, 10 aa, synthetic construct
ATPRGDRTNL

SEQ ID NO: 140346 - protein, 10 aa, synthetic construct
ATLRGDRTNL

SEQ ID NO: 140347 - protein, 10 aa, synthetic construct
ATIRGDRTNL

SEQ ID NO: 140348 - protein, 10 aa, synthetic construct
ATMRGDRTNL

SEQ ID NO: 140349 - protein, 10 aa, synthetic construct
ATWRGDRTNL

SEQ ID NO: 140350 - protein, 10 aa, synthetic construct
ATFRGDRTNL

SEQ ID NO: 140351 - protein, 10 aa, synthetic construct
ATKRGDRTNL

SEQ ID NO: 140352 - protein, 10 aa, synthetic construct
ATRRGDRTNL

SEQ ID NO: 140353 - protein, 10 aa, synthetic construct
ATHRGDRTNL

SEQ ID NO: 140354 - protein, 10 aa, synthetic construct
ATSRGDRTNL

SEQ ID NO: 140355 - protein, 10 aa, synthetic construct
ATTRGDRTNL

SEQ ID NO: 140356 - protein, 10 aa, synthetic construct
ATYRGDRTNL

SEQ ID NO: 140357 - protein, 10 aa, synthetic construct
ATNRGDRTNL

SEQ ID NO: 140358 - protein, 10 aa, synthetic construct
ATQRGDRTNL

SEQ ID NO: 140359 - protein, 10 aa, synthetic construct
ATDRGDRTNL

SEQ ID NO: 140360 - protein, 10 aa, synthetic construct
ATERGDRTNL

SEQ ID NO: 140361 - protein, 10 aa, synthetic construct
AYGRGDRTNL

SEQ ID NO: 140362 - protein, 10 aa, synthetic construct
AYARGDRTNL

SEQ ID NO: 140363 - protein, 10 aa, synthetic construct
AYVRGDRTNL

SEQ ID NO: 140364 - protein, 10 aa, synthetic construct
AYPRGDRTNL

SEQ ID NO: 140365 - protein, 10 aa, synthetic construct
AYLRGDRTNL

SEQ ID NO: 140366 - protein, 10 aa, synthetic construct
AYIRGDRTNL

SEQ ID NO: 140367 - protein, 10 aa, synthetic construct
AYMRGDRTNL

SEQ ID NO: 140368 - protein, 10 aa, synthetic construct
AYWRGDRTNL

SEQ ID NO: 140369 - protein, 10 aa, synthetic construct
AYFRGDRTNL

SEQ ID NO: 140370 - protein, 10 aa, synthetic construct
AYKRGDRTNL

SEQ ID NO: 140371 - protein, 10 aa, synthetic construct
AYRRGDRTNL

SEQ ID NO: 140372 - protein, 10 aa, synthetic construct
AYHRGDRTNL

SEQ ID NO: 140373 - protein, 10 aa, synthetic construct
AYSRGDRTNL

SEQ ID NO: 140374 - protein, 10 aa, synthetic construct
AYTRGDRTNL

SEQ ID NO: 140375 - protein, 10 aa, synthetic construct
AYYRGDRTNL

SEQ ID NO: 140376 - protein, 10 aa, synthetic construct
AYNRGDRTNL

SEQ ID NO: 140377 - protein, 10 aa, synthetic construct
AYQRGDRTNL

SEQ ID NO: 140378 - protein, 10 aa, synthetic construct
AYDRGDRTNL

SEQ ID NO: 140379 - protein, 10 aa, synthetic construct
AYERGDRTNL

SEQ ID NO: 140380 - protein, 10 aa, synthetic construct
ANGRGDRTNL

SEQ ID NO: 140381 - protein, 10 aa, synthetic construct
ANARGDRTNL

SEQ ID NO: 140382 - protein, 10 aa, synthetic construct
ANVRGDRTNL

SEQ ID NO: 140383 - protein, 10 aa, synthetic construct
ANPRGDRTNL

SEQ ID NO: 140384 - protein, 10 aa, synthetic construct
ANLRGDRTNL

SEQ ID NO: 140385 - protein, 10 aa, synthetic construct
ANIRGDRTNL

SEQ ID NO: 140386 - protein, 10 aa, synthetic construct
ANMRGDRTNL

SEQ ID NO: 140387 - protein, 10 aa, synthetic construct
ANWRGDRTNL

SEQ ID NO: 140388 - protein, 10 aa, synthetic construct
ANFRGDRTNL

SEQ ID NO: 140389 - protein, 10 aa, synthetic construct
ANKRGDRTNL

SEQ ID NO: 140390 - protein, 10 aa, synthetic construct
ANRRGDRTNL

SEQ ID NO: 140391 - protein, 10 aa, synthetic construct
ANHRGDRTNL

SEQ ID NO: 140392 - protein, 10 aa, synthetic construct
ANSRGDRTNL

SEQ ID NO: 140393 - protein, 10 aa, synthetic construct
ANTRGDRTNL

SEQ ID NO: 140394 - protein, 10 aa, synthetic construct
ANYRGDRTNL

SEQ ID NO: 140395 - protein, 10 aa, synthetic construct
ANNRGDRTNL

SEQ ID NO: 140396 - protein, 10 aa, synthetic construct
ANQRGDRTNL

SEQ ID NO: 140397 - protein, 10 aa, synthetic construct
ANDRGDRTNL

SEQ ID NO: 140398 - protein, 10 aa, synthetic construct
ANERGDRTNL

SEQ ID NO: 140399 - protein, 10 aa, synthetic construct
AQGRGDRTNL

SEQ ID NO: 140400 - protein, 10 aa, synthetic construct
AQARGDRTNL

SEQ ID NO: 140401 - protein, 10 aa, synthetic construct
AQVRGDRTNL

SEQ ID NO: 140402 - protein, 10 aa, synthetic construct
AQPRGDRTNL

SEQ ID NO: 140403 - protein, 10 aa, synthetic construct
AQLRGDRTNL

SEQ ID NO: 140404 - protein, 10 aa, synthetic construct
AQIRGDRTNL

SEQ ID NO: 140405 - protein, 10 aa, synthetic construct
AQMRGDRTNL

SEQ ID NO: 140406 - protein, 10 aa, synthetic construct
AQWRGDRTNL

SEQ ID NO: 140407 - protein, 10 aa, synthetic construct
AQFRGDRTNL

SEQ ID NO: 140408 - protein, 10 aa, synthetic construct
AQKRGDRTNL

SEQ ID NO: 140409 - protein, 10 aa, synthetic construct
AQRRGDRTNL

SEQ ID NO: 140410 - protein, 10 aa, synthetic construct
AQHRGDRTNL

SEQ ID NO: 140411 - protein, 10 aa, synthetic construct
AQSRGDRTNL

SEQ ID NO: 140412 - protein, 10 aa, synthetic construct
AQTRGDRTNL

SEQ ID NO: 140413 - protein, 10 aa, synthetic construct
AQYRGDRTNL

SEQ ID NO: 140414 - protein, 10 aa, synthetic construct
AQNRGDRTNL

SEQ ID NO: 140415 - protein, 10 aa, synthetic construct
AQQRGDRTNL

SEQ ID NO: 140416 - protein, 10 aa, synthetic construct
AQDRGDRTNL

SEQ ID NO: 140417 - protein, 10 aa, synthetic construct
AQERGDRTNL

SEQ ID NO: 140418 - protein, 10 aa, synthetic construct
ADGRGDRTNL

SEQ ID NO: 140419 - protein, 10 aa, synthetic construct
ADARGDRTNL

SEQ ID NO: 140420 - protein, 10 aa, synthetic construct
ADVRGDRTNL

SEQ ID NO: 140421 - protein, 10 aa, synthetic construct
ADPRGDRTNL

SEQ ID NO: 140422 - protein, 10 aa, synthetic construct
ADLRGDRTNL

SEQ ID NO: 140423 - protein, 10 aa, synthetic construct
ADIRGDRTNL

SEQ ID NO: 140424 - protein, 10 aa, synthetic construct
ADMRGDRTNL

SEQ ID NO: 140425 - protein, 10 aa, synthetic construct
ADWRGDRTNL

SEQ ID NO: 140426 - protein, 10 aa, synthetic construct
ADFRGDRTNL

SEQ ID NO: 140427 - protein, 10 aa, synthetic construct
ADKRGDRTNL

SEQ ID NO: 140428 - protein, 10 aa, synthetic construct
ADRRGDRTNL

SEQ ID NO: 140429 - protein, 10 aa, synthetic construct
ADHRGDRTNL

SEQ ID NO: 140430 - protein, 10 aa, synthetic construct
ADSRGDRTNL

SEQ ID NO: 140431 - protein, 10 aa, synthetic construct
ADTRGDRTNL

SEQ ID NO: 140432 - protein, 10 aa, synthetic construct
ADYRGDRTNL

SEQ ID NO: 140433 - protein, 10 aa, synthetic construct
ADNRGDRTNL

SEQ ID NO: 140434 - protein, 10 aa, synthetic construct
ADQRGDRTNL

SEQ ID NO: 140435 - protein, 10 aa, synthetic construct
ADDRGDRTNL

SEQ ID NO: 140436 - protein, 10 aa, synthetic construct
ADERGDRTNL

SEQ ID NO: 140437 - protein, 10 aa, synthetic construct
AEGRGDRTNL

SEQ ID NO: 140438 - protein, 10 aa, synthetic construct
AEARGDRTNL

SEQ ID NO: 140439 - protein, 10 aa, synthetic construct
AEVRGDRTNL

SEQ ID NO: 140440 - protein, 10 aa, synthetic construct
AEPRGDRTNL

SEQ ID NO: 140441 - protein, 10 aa, synthetic construct
AELRGDRTNL

SEQ ID NO: 140442 - protein, 10 aa, synthetic construct
AEIRGDRTNL

SEQ ID NO: 140443 - protein, 10 aa, synthetic construct
AEMRGDRTNL

SEQ ID NO: 140444 - protein, 10 aa, synthetic construct
AEWRGDRTNL

SEQ ID NO: 140445 - protein, 10 aa, synthetic construct
AEFRGDRTNL

SEQ ID NO: 140446 - protein, 10 aa, synthetic construct
AEKRGDRTNL

SEQ ID NO: 140447 - protein, 10 aa, synthetic construct
AERRGDRTNL

SEQ ID NO: 140448 - protein, 10 aa, synthetic construct
AEHRGDRTNL

SEQ ID NO: 140449 - protein, 10 aa, synthetic construct
AESRGDRTNL

SEQ ID NO: 140450 - protein, 10 aa, synthetic construct
AETRGDRTNL

SEQ ID NO: 140451 - protein, 10 aa, synthetic construct
AEYRGDRTNL

SEQ ID NO: 140452 - protein, 10 aa, synthetic construct
AENRGDRTNL

SEQ ID NO: 140453 - protein, 10 aa, synthetic construct
AEQRGDRTNL

SEQ ID NO: 140454 - protein, 10 aa, synthetic construct
AEDRGDRTNL

SEQ ID NO: 140455 - protein, 10 aa, synthetic construct
AEERGDRTNL

SEQ ID NO: 140456 - protein, 10 aa, synthetic construct
EGGRGDRTNL

SEQ ID NO: 140457 - protein, 10 aa, synthetic construct
EGARGDRTNL

SEQ ID NO: 140458 - protein, 10 aa, synthetic construct
EGVRGDRTNL

SEQ ID NO: 140459 - protein, 10 aa, synthetic construct
EGPRGDRTNL

SEQ ID NO: 140460 - protein, 10 aa, synthetic construct
EGLRGDRTNL

SEQ ID NO: 140461 - protein, 10 aa, synthetic construct
EGIRGDRTNL

SEQ ID NO: 140462 - protein, 10 aa, synthetic construct
EGMRGDRTNL

SEQ ID NO: 140463 - protein, 10 aa, synthetic construct
EGWRGDRTNL

SEQ ID NO: 140464 - protein, 10 aa, synthetic construct
EGFRGDRTNL

SEQ ID NO: 140465 - protein, 10 aa, synthetic construct
EGKRGDRTNL

SEQ ID NO: 140466 - protein, 10 aa, synthetic construct
EGRRGDRTNL

SEQ ID NO: 140467 - protein, 10 aa, synthetic construct
EGHRGDRTNL

SEQ ID NO: 140468 - protein, 10 aa, synthetic construct
EGSRGDRTNL

SEQ ID NO: 140469 - protein, 10 aa, synthetic construct
EGTRGDRTNL

SEQ ID NO: 140470 - protein, 10 aa, synthetic construct
EGYRGDRTNL

SEQ ID NO: 140471 - protein, 10 aa, synthetic construct
EGNRGDRTNL

SEQ ID NO: 140472 - protein, 10 aa, synthetic construct
EGQRGDRTNL

SEQ ID NO: 140473 - protein, 10 aa, synthetic construct
EGDRGDRTNL

SEQ ID NO: 140474 - protein, 10 aa, synthetic construct
EGERGDRTNL

SEQ ID NO: 140475 - protein, 10 aa, synthetic construct
EAGRGDRTNL

SEQ ID NO: 140476 - protein, 10 aa, synthetic construct
EAARGDRTNL

SEQ ID NO: 140477 - protein, 10 aa, synthetic construct
EAVRGDRTNL

SEQ ID NO: 140478 - protein, 10 aa, synthetic construct
EAPRGDRTNL

SEQ ID NO: 140479 - protein, 10 aa, synthetic construct
EALRGDRTNL

SEQ ID NO: 140480 - protein, 10 aa, synthetic construct
EAIRGDRTNL

SEQ ID NO: 140481 - protein, 10 aa, synthetic construct
EAMRGDRTNL

SEQ ID NO: 140482 - protein, 10 aa, synthetic construct
EAWRGDRTNL

SEQ ID NO: 140483 - protein, 10 aa, synthetic construct
EAFRGDRTNL

SEQ ID NO: 140484 - protein, 10 aa, synthetic construct
EAKRGDRTNL

SEQ ID NO: 140485 - protein, 10 aa, synthetic construct
EARRGDRTNL

SEQ ID NO: 140486 - protein, 10 aa, synthetic construct
EAHRGDRTNL

SEQ ID NO: 140487 - protein, 10 aa, synthetic construct
EASRGDRTNL

SEQ ID NO: 140488 - protein, 10 aa, synthetic construct
EATRGDRTNL

SEQ ID NO: 140489 - protein, 10 aa, synthetic construct
EAYRGDRTNL

SEQ ID NO: 140490 - protein, 10 aa, synthetic construct
EANRGDRTNL

SEQ ID NO: 140491 - protein, 10 aa, synthetic construct
EAQRGDRTNL

SEQ ID NO: 140492 - protein, 10 aa, synthetic construct
EADRGDRTNL

SEQ ID NO: 140493 - protein, 10 aa, synthetic construct
EAERGDRTNL

SEQ ID NO: 140494 - protein, 10 aa, synthetic construct
EVGRGDRTNL

SEQ ID NO: 140495 - protein, 10 aa, synthetic construct
EVARGDRTNL

SEQ ID NO: 140496 - protein, 10 aa, synthetic construct
EVVRGDRTNL

SEQ ID NO: 140497 - protein, 10 aa, synthetic construct
EVPRGDRTNL

SEQ ID NO: 140498 - protein, 10 aa, synthetic construct
EVLRGDRTNL

SEQ ID NO: 140499 - protein, 10 aa, synthetic construct
EVIRGDRTNL

SEQ ID NO: 140500 - protein, 10 aa, synthetic construct
EVMRGDRTNL

SEQ ID NO: 140501 - protein, 10 aa, synthetic construct
EVWRGDRTNL

SEQ ID NO: 140502 - protein, 10 aa, synthetic construct
EVFRGDRTNL

SEQ ID NO: 140503 - protein, 10 aa, synthetic construct
EVKRGDRTNL

SEQ ID NO: 140504 - protein, 10 aa, synthetic construct
EVRRGDRTNL

SEQ ID NO: 140505 - protein, 10 aa, synthetic construct
EVHRGDRTNL

SEQ ID NO: 140506 - protein, 10 aa, synthetic construct
EVSRGDRTNL

SEQ ID NO: 140507 - protein, 10 aa, synthetic construct
EVTRGDRTNL

SEQ ID NO: 140508 - protein, 10 aa, synthetic construct
EVYRGDRTNL

SEQ ID NO: 140509 - protein, 10 aa, synthetic construct
EVNRGDRTNL

SEQ ID NO: 140510 - protein, 10 aa, synthetic construct
EVQRGDRTNL

SEQ ID NO: 140511 - protein, 10 aa, synthetic construct
EVDRGDRTNL

SEQ ID NO: 140512 - protein, 10 aa, synthetic construct
EVERGDRTNL

SEQ ID NO: 140513 - protein, 10 aa, synthetic construct
EPGRGDRTNL

SEQ ID NO: 140514 - protein, 10 aa, synthetic construct
EPARGDRTNL

SEQ ID NO: 140515 - protein, 10 aa, synthetic construct
EPVRGDRTNL

SEQ ID NO: 140516 - protein, 10 aa, synthetic construct
EPPRGDRTNL

SEQ ID NO: 140517 - protein, 10 aa, synthetic construct
EPLRGDRTNL

SEQ ID NO: 140518 - protein, 10 aa, synthetic construct
EPIRGDRTNL

SEQ ID NO: 140519 - protein, 10 aa, synthetic construct
EPMRGDRTNL

SEQ ID NO: 140520 - protein, 10 aa, synthetic construct
EPWRGDRTNL

SEQ ID NO: 140521 - protein, 10 aa, synthetic construct
EPFRGDRTNL

SEQ ID NO: 140522 - protein, 10 aa, synthetic construct
EPKRGDRTNL

SEQ ID NO: 140523 - protein, 10 aa, synthetic construct
EPRRGDRTNL

SEQ ID NO: 140524 - protein, 10 aa, synthetic construct
EPHRGDRTNL

SEQ ID NO: 140525 - protein, 10 aa, synthetic construct
EPSRGDRTNL

SEQ ID NO: 140526 - protein, 10 aa, synthetic construct
EPTRGDRTNL

SEQ ID NO: 140527 - protein, 10 aa, synthetic construct
EPYRGDRTNL

SEQ ID NO: 140528 - protein, 10 aa, synthetic construct
EPNRGDRTNL

SEQ ID NO: 140529 - protein, 10 aa, synthetic construct
EPQRGDRTNL

SEQ ID NO: 140530 - protein, 10 aa, synthetic construct
EPDRGDRTNL

SEQ ID NO: 140531 - protein, 10 aa, synthetic construct
EPERGDRTNL

SEQ ID NO: 140532 - protein, 10 aa, synthetic construct
ELGRGDRTNL

SEQ ID NO: 140533 - protein, 10 aa, synthetic construct
ELARGDRTNL

SEQ ID NO: 140534 - protein, 10 aa, synthetic construct
ELVRGDRTNL

SEQ ID NO: 140535 - protein, 10 aa, synthetic construct
ELPRGDRTNL

SEQ ID NO: 140536 - protein, 10 aa, synthetic construct
ELLRGDRTNL

SEQ ID NO: 140537 - protein, 10 aa, synthetic construct
ELIRGDRTNL

SEQ ID NO: 140538 - protein, 10 aa, synthetic construct
ELMRGDRTNL

SEQ ID NO: 140539 - protein, 10 aa, synthetic construct
ELWRGDRTNL

SEQ ID NO: 140540 - protein, 10 aa, synthetic construct
ELFRGDRTNL

SEQ ID NO: 140541 - protein, 10 aa, synthetic construct
ELKRGDRTNL

SEQ ID NO: 140542 - protein, 10 aa, synthetic construct
ELRRGDRTNL

SEQ ID NO: 140543 - protein, 10 aa, synthetic construct
ELHRGDRTNL

SEQ ID NO: 140544 - protein, 10 aa, synthetic construct
ELSRGDRTNL

SEQ ID NO: 140545 - protein, 10 aa, synthetic construct
ELTRGDRTNL

SEQ ID NO: 140546 - protein, 10 aa, synthetic construct
ELYRGDRTNL

SEQ ID NO: 140547 - protein, 10 aa, synthetic construct
ELNRGDRTNL

SEQ ID NO: 140548 - protein, 10 aa, synthetic construct
ELQRGDRTNL

SEQ ID NO: 140549 - protein, 10 aa, synthetic construct
ELDRGDRTNL

SEQ ID NO: 140550 - protein, 10 aa, synthetic construct
ELERGDRTNL

SEQ ID NO: 140551 - protein, 10 aa, synthetic construct
EIGRGDRTNL

SEQ ID NO: 140552 - protein, 10 aa, synthetic construct
EIARGDRTNL

SEQ ID NO: 140553 - protein, 10 aa, synthetic construct
EIVRGDRTNL

SEQ ID NO: 140554 - protein, 10 aa, synthetic construct
EIPRGDRTNL

SEQ ID NO: 140555 - protein, 10 aa, synthetic construct
EILRGDRTNL

SEQ ID NO: 140556 - protein, 10 aa, synthetic construct
EIIRGDRTNL

SEQ ID NO: 140557 - protein, 10 aa, synthetic construct
EIMRGDRTNL

SEQ ID NO: 140558 - protein, 10 aa, synthetic construct
EIWRGDRTNL

SEQ ID NO: 140559 - protein, 10 aa, synthetic construct
EIFRGDRTNL

SEQ ID NO: 140560 - protein, 10 aa, synthetic construct
EIKRGDRTNL

SEQ ID NO: 140561 - protein, 10 aa, synthetic construct
EIRRGDRTNL

SEQ ID NO: 140562 - protein, 10 aa, synthetic construct
EIHRGDRTNL

SEQ ID NO: 140563 - protein, 10 aa, synthetic construct
EISRGDRTNL

SEQ ID NO: 140564 - protein, 10 aa, synthetic construct
EITRGDRTNL

SEQ ID NO: 140565 - protein, 10 aa, synthetic construct
EIYRGDRTNL

SEQ ID NO: 140566 - protein, 10 aa, synthetic construct
EINRGDRTNL

SEQ ID NO: 140567 - protein, 10 aa, synthetic construct
EIQRGDRTNL

SEQ ID NO: 140568 - protein, 10 aa, synthetic construct
EIDRGDRTNL

SEQ ID NO: 140569 - protein, 10 aa, synthetic construct
EIERGDRTNL

SEQ ID NO: 140570 - protein, 10 aa, synthetic construct
EMGRGDRTNL

SEQ ID NO: 140571 - protein, 10 aa, synthetic construct
EMARGDRTNL

SEQ ID NO: 140572 - protein, 10 aa, synthetic construct
EMVRGDRTNL

SEQ ID NO: 140573 - protein, 10 aa, synthetic construct
EMPRGDRTNL

SEQ ID NO: 140574 - protein, 10 aa, synthetic construct
EMLRGDRTNL

SEQ ID NO: 140575 - protein, 10 aa, synthetic construct
EMIRGDRTNL

SEQ ID NO: 140576 - protein, 10 aa, synthetic construct
EMMRGDRTNL

SEQ ID NO: 140577 - protein, 10 aa, synthetic construct
EMWRGDRTNL

SEQ ID NO: 140578 - protein, 10 aa, synthetic construct
EMFRGDRTNL

SEQ ID NO: 140579 - protein, 10 aa, synthetic construct
EMKRGDRTNL

SEQ ID NO: 140580 - protein, 10 aa, synthetic construct
EMRRGDRTNL

SEQ ID NO: 140581 - protein, 10 aa, synthetic construct
EMHRGDRTNL

SEQ ID NO: 140582 - protein, 10 aa, synthetic construct
EMSRGDRTNL

SEQ ID NO: 140583 - protein, 10 aa, synthetic construct
EMTRGDRTNL

SEQ ID NO: 140584 - protein, 10 aa, synthetic construct
EMYRGDRTNL

SEQ ID NO: 140585 - protein, 10 aa, synthetic construct
EMNRGDRTNL

SEQ ID NO: 140586 - protein, 10 aa, synthetic construct
EMQRGDRTNL

SEQ ID NO: 140587 - protein, 10 aa, synthetic construct
EMDRGDRTNL

SEQ ID NO: 140588 - protein, 10 aa, synthetic construct
EMERGDRTNL

SEQ ID NO: 140589 - protein, 10 aa, synthetic construct
EWGRGDRTNL

SEQ ID NO: 140590 - protein, 10 aa, synthetic construct
EWARGDRTNL

SEQ ID NO: 140591 - protein, 10 aa, synthetic construct
EWVRGDRTNL

SEQ ID NO: 140592 - protein, 10 aa, synthetic construct
EWPRGDRTNL

SEQ ID NO: 140593 - protein, 10 aa, synthetic construct
EWLRGDRTNL

SEQ ID NO: 140594 - protein, 10 aa, synthetic construct
EWIRGDRTNL

SEQ ID NO: 140595 - protein, 10 aa, synthetic construct
EWMRGDRTNL

SEQ ID NO: 140596 - protein, 10 aa, synthetic construct
EWWRGDRTNL

SEQ ID NO: 140597 - protein, 10 aa, synthetic construct
EWFRGDRTNL

SEQ ID NO: 140598 - protein, 10 aa, synthetic construct
EWKRGDRTNL

SEQ ID NO: 140599 - protein, 10 aa, synthetic construct
EWRRGDRTNL

SEQ ID NO: 140600 - protein, 10 aa, synthetic construct
EWHRGDRTNL

SEQ ID NO: 140601 - protein, 10 aa, synthetic construct
EWSRGDRTNL

SEQ ID NO: 140602 - protein, 10 aa, synthetic construct
EWTRGDRTNL

SEQ ID NO: 140603 - protein, 10 aa, synthetic construct
EWYRGDRTNL

SEQ ID NO: 140604 - protein, 10 aa, synthetic construct
EWNRGDRTNL

SEQ ID NO: 140605 - protein, 10 aa, synthetic construct
EWQRGDRTNL

SEQ ID NO: 140606 - protein, 10 aa, synthetic construct
EWDRGDRTNL

SEQ ID NO: 140607 - protein, 10 aa, synthetic construct
EWERGDRTNL

SEQ ID NO: 140608 - protein, 10 aa, synthetic construct
EFGRGDRTNL

SEQ ID NO: 140609 - protein, 10 aa, synthetic construct
EFARGDRTNL

SEQ ID NO: 140610 - protein, 10 aa, synthetic construct
EFVRGDRTNL

SEQ ID NO: 140611 - protein, 10 aa, synthetic construct
EFPRGDRTNL

SEQ ID NO: 140612 - protein, 10 aa, synthetic construct
EFLRGDRTNL

SEQ ID NO: 140613 - protein, 10 aa, synthetic construct
EFIRGDRTNL

SEQ ID NO: 140614 - protein, 10 aa, synthetic construct
EFMRGDRTNL

SEQ ID NO: 140615 - protein, 10 aa, synthetic construct
EFWRGDRTNL

SEQ ID NO: 140616 - protein, 10 aa, synthetic construct
EFFRGDRTNL

SEQ ID NO: 140617 - protein, 10 aa, synthetic construct
EFKRGDRTNL

SEQ ID NO: 140618 - protein, 10 aa, synthetic construct
EFRRGDRTNL

SEQ ID NO: 140619 - protein, 10 aa, synthetic construct
EFHRGDRTNL

SEQ ID NO: 140620 - protein, 10 aa, synthetic construct
EFSRGDRTNL

SEQ ID NO: 140621 - protein, 10 aa, synthetic construct
EFTRGDRTNL

SEQ ID NO: 140622 - protein, 10 aa, synthetic construct
EFYRGDRTNL

SEQ ID NO: 140623 - protein, 10 aa, synthetic construct
EFNRGDRTNL

SEQ ID NO: 140624 - protein, 10 aa, synthetic construct
EFQRGDRTNL

SEQ ID NO: 140625 - protein, 10 aa, synthetic construct
EFDRGDRTNL

SEQ ID NO: 140626 - protein, 10 aa, synthetic construct
EFERGDRTNL

SEQ ID NO: 140627 - protein, 10 aa, synthetic construct
EKGRGDRTNL

SEQ ID NO: 140628 - protein, 10 aa, synthetic construct
EKARGDRTNL

SEQ ID NO: 140629 - protein, 10 aa, synthetic construct
EKVRGDRTNL

SEQ ID NO: 140630 - protein, 10 aa, synthetic construct
EKPRGDRTNL

SEQ ID NO: 140631 - protein, 10 aa, synthetic construct
EKLRGDRTNL

SEQ ID NO: 140632 - protein, 10 aa, synthetic construct
EKIRGDRTNL

SEQ ID NO: 140633 - protein, 10 aa, synthetic construct
EKMRGDRTNL

SEQ ID NO: 140634 - protein, 10 aa, synthetic construct
EKWRGDRTNL

SEQ ID NO: 140635 - protein, 10 aa, synthetic construct
EKFRGDRTNL

SEQ ID NO: 140636 - protein, 10 aa, synthetic construct
EKKRGDRTNL

SEQ ID NO: 140637 - protein, 10 aa, synthetic construct
EKRRGDRTNL

SEQ ID NO: 140638 - protein, 10 aa, synthetic construct
EKHRGDRTNL

SEQ ID NO: 140639 - protein, 10 aa, synthetic construct
EKSRGDRTNL

SEQ ID NO: 140640 - protein, 10 aa, synthetic construct
EKTRGDRTNL

SEQ ID NO: 140641 - protein, 10 aa, synthetic construct
EKYRGDRTNL

SEQ ID NO: 140642 - protein, 10 aa, synthetic construct
EKNRGDRTNL

SEQ ID NO: 140643 - protein, 10 aa, synthetic construct
EKQRGDRTNL

SEQ ID NO: 140644 - protein, 10 aa, synthetic construct
EKDRGDRTNL

SEQ ID NO: 140645 - protein, 10 aa, synthetic construct
EKERGDRTNL

SEQ ID NO: 140646 - protein, 10 aa, synthetic construct
ERGRGDRTNL

SEQ ID NO: 140647 - protein, 10 aa, synthetic construct
ERARGDRTNL

SEQ ID NO: 140648 - protein, 10 aa, synthetic construct
ERVRGDRTNL

SEQ ID NO: 140649 - protein, 10 aa, synthetic construct
ERPRGDRTNL

SEQ ID NO: 140650 - protein, 10 aa, synthetic construct
ERLRGDRTNL

SEQ ID NO: 140651 - protein, 10 aa, synthetic construct
ERIRGDRTNL

SEQ ID NO: 140652 - protein, 10 aa, synthetic construct
ERMRGDRTNL

SEQ ID NO: 140653 - protein, 10 aa, synthetic construct
ERWRGDRTNL

SEQ ID NO: 140654 - protein, 10 aa, synthetic construct
ERFRGDRTNL

SEQ ID NO: 140655 - protein, 10 aa, synthetic construct
ERKRGDRTNL

SEQ ID NO: 140656 - protein, 10 aa, synthetic construct
ERRRGDRTNL

SEQ ID NO: 140657 - protein, 10 aa, synthetic construct
ERHRGDRTNL

SEQ ID NO: 140658 - protein, 10 aa, synthetic construct
ERSRGDRTNL

SEQ ID NO: 140659 - protein, 10 aa, synthetic construct
ERTRGDRTNL

SEQ ID NO: 140660 - protein, 10 aa, synthetic construct
ERYRGDRTNL

SEQ ID NO: 140661 - protein, 10 aa, synthetic construct
ERNRGDRTNL

SEQ ID NO: 140662 - protein, 10 aa, synthetic construct
ERQRGDRTNL

SEQ ID NO: 140663 - protein, 10 aa, synthetic construct
ERDRGDRTNL

SEQ ID NO: 140664 - protein, 10 aa, synthetic construct
ERERGDRTNL

SEQ ID NO: 140665 - protein, 10 aa, synthetic construct
EHGRGDRTNL

SEQ ID NO: 140666 - protein, 10 aa, synthetic construct
EHARGDRTNL

SEQ ID NO: 140667 - protein, 10 aa, synthetic construct
EHVRGDRTNL

SEQ ID NO: 140668 - protein, 10 aa, synthetic construct
EHPRGDRTNL

SEQ ID NO: 140669 - protein, 10 aa, synthetic construct
EHLRGDRTNL

SEQ ID NO: 140670 - protein, 10 aa, synthetic construct
EHIRGDRTNL

SEQ ID NO: 140671 - protein, 10 aa, synthetic construct
EHMRGDRTNL

SEQ ID NO: 140672 - protein, 10 aa, synthetic construct
EHWRGDRTNL

SEQ ID NO: 140673 - protein, 10 aa, synthetic construct
EHFRGDRTNL

SEQ ID NO: 140674 - protein, 10 aa, synthetic construct
EHKRGDRTNL

SEQ ID NO: 140675 - protein, 10 aa, synthetic construct
EHRRGDRTNL

SEQ ID NO: 140676 - protein, 10 aa, synthetic construct
EHHRGDRTNL

SEQ ID NO: 140677 - protein, 10 aa, synthetic construct
EHSRGDRTNL

SEQ ID NO: 140678 - protein, 10 aa, synthetic construct
EHTRGDRTNL

SEQ ID NO: 140679 - protein, 10 aa, synthetic construct
EHYRGDRTNL

SEQ ID NO: 140680 - protein, 10 aa, synthetic construct
EHNRGDRTNL

SEQ ID NO: 140681 - protein, 10 aa, synthetic construct
EHQRGDRTNL

SEQ ID NO: 140682 - protein, 10 aa, synthetic construct
EHDRGDRTNL

SEQ ID NO: 140683 - protein, 10 aa, synthetic construct
EHERGDRTNL

SEQ ID NO: 140684 - protein, 10 aa, synthetic construct
ESGRGDRTNL

SEQ ID NO: 140685 - protein, 10 aa, synthetic construct
ESARGDRTNL

SEQ ID NO: 140686 - protein, 10 aa, synthetic construct
ESVRGDRTNL

SEQ ID NO: 140687 - protein, 10 aa, synthetic construct
ESPRGDRTNL

SEQ ID NO: 140688 - protein, 10 aa, synthetic construct
ESLRGDRTNL

SEQ ID NO: 140689 - protein, 10 aa, synthetic construct
ESIRGDRTNL

SEQ ID NO: 140690 - protein, 10 aa, synthetic construct
ESMRGDRTNL

SEQ ID NO: 140691 - protein, 10 aa, synthetic construct
ESWRGDRTNL

SEQ ID NO: 140692 - protein, 10 aa, synthetic construct
ESFRGDRTNL

SEQ ID NO: 140693 - protein, 10 aa, synthetic construct
ESKRGDRTNL

SEQ ID NO: 140694 - protein, 10 aa, synthetic construct
ESRRGDRTNL

SEQ ID NO: 140695 - protein, 10 aa, synthetic construct
ESHRGDRTNL

SEQ ID NO: 140696 - protein, 10 aa, synthetic construct
ESSRGDRTNL

SEQ ID NO: 140697 - protein, 10 aa, synthetic construct
ESTRGDRTNL

SEQ ID NO: 140698 - protein, 10 aa, synthetic construct
ESYRGDRTNL

SEQ ID NO: 140699 - protein, 10 aa, synthetic construct
ESNRGDRTNL

SEQ ID NO: 140700 - protein, 10 aa, synthetic construct
ESQRGDRTNL

SEQ ID NO: 140701 - protein, 10 aa, synthetic construct
ESDRGDRTNL

SEQ ID NO: 140702 - protein, 10 aa, synthetic construct
ESERGDRTNL

SEQ ID NO: 140703 - protein, 10 aa, synthetic construct
ETGRGDRTNL

SEQ ID NO: 140704 - protein, 10 aa, synthetic construct
ETARGDRTNL

SEQ ID NO: 140705 - protein, 10 aa, synthetic construct
ETVRGDRTNL

SEQ ID NO: 140706 - protein, 10 aa, synthetic construct
ETPRGDRTNL

SEQ ID NO: 140707 - protein, 10 aa, synthetic construct
ETLRGDRTNL

SEQ ID NO: 140708 - protein, 10 aa, synthetic construct
ETIRGDRTNL

SEQ ID NO: 140709 - protein, 10 aa, synthetic construct
ETMRGDRTNL

SEQ ID NO: 140710 - protein, 10 aa, synthetic construct
ETWRGDRTNL

SEQ ID NO: 140711 - protein, 10 aa, synthetic construct
ETFRGDRTNL

SEQ ID NO: 140712 - protein, 10 aa, synthetic construct
ETKRGDRTNL

SEQ ID NO: 140713 - protein, 10 aa, synthetic construct
ETRRGDRTNL

SEQ ID NO: 140714 - protein, 10 aa, synthetic construct
ETHRGDRTNL

SEQ ID NO: 140715 - protein, 10 aa, synthetic construct
ETSRGDRTNL

SEQ ID NO: 140716 - protein, 10 aa, synthetic construct
ETTRGDRTNL

SEQ ID NO: 140717 - protein, 10 aa, synthetic construct
ETYRGDRTNL

SEQ ID NO: 140718 - protein, 10 aa, synthetic construct
ETNRGDRTNL

SEQ ID NO: 140719 - protein, 10 aa, synthetic construct
ETQRGDRTNL

SEQ ID NO: 140720 - protein, 10 aa, synthetic construct
ETDRGDRTNL

SEQ ID NO: 140721 - protein, 10 aa, synthetic construct
ETERGDRTNL

SEQ ID NO: 140722 - protein, 10 aa, synthetic construct
EYGRGDRTNL

SEQ ID NO: 140723 - protein, 10 aa, synthetic construct
EYARGDRTNL

SEQ ID NO: 140724 - protein, 10 aa, synthetic construct
EYVRGDRTNL

SEQ ID NO: 140725 - protein, 10 aa, synthetic construct
EYPRGDRTNL

SEQ ID NO: 140726 - protein, 10 aa, synthetic construct
EYLRGDRTNL

SEQ ID NO: 140727 - protein, 10 aa, synthetic construct
EYIRGDRTNL

SEQ ID NO: 140728 - protein, 10 aa, synthetic construct
EYMRGDRTNL

SEQ ID NO: 140729 - protein, 10 aa, synthetic construct
EYWRGDRTNL

SEQ ID NO: 140730 - protein, 10 aa, synthetic construct
EYFRGDRTNL

SEQ ID NO: 140731 - protein, 10 aa, synthetic construct
EYKRGDRTNL

SEQ ID NO: 140732 - protein, 10 aa, synthetic construct
EYRRGDRTNL

SEQ ID NO: 140733 - protein, 10 aa, synthetic construct
EYHRGDRTNL

SEQ ID NO: 140734 - protein, 10 aa, synthetic construct
EYSRGDRTNL

SEQ ID NO: 140735 - protein, 10 aa, synthetic construct
EYTRGDRTNL

SEQ ID NO: 140736 - protein, 10 aa, synthetic construct
EYYRGDRTNL

SEQ ID NO: 140737 - protein, 10 aa, synthetic construct
EYNRGDRTNL

SEQ ID NO: 140738 - protein, 10 aa, synthetic construct
EYQRGDRTNL

SEQ ID NO: 140739 - protein, 10 aa, synthetic construct
EYDRGDRTNL

SEQ ID NO: 140740 - protein, 10 aa, synthetic construct
EYERGDRTNL

SEQ ID NO: 140741 - protein, 10 aa, synthetic construct
ENGRGDRTNL

SEQ ID NO: 140742 - protein, 10 aa, synthetic construct
ENARGDRTNL

SEQ ID NO: 140743 - protein, 10 aa, synthetic construct
ENVRGDRTNL

SEQ ID NO: 140744 - protein, 10 aa, synthetic construct
ENPRGDRTNL

SEQ ID NO: 140745 - protein, 10 aa, synthetic construct
ENLRGDRTNL

SEQ ID NO: 140746 - protein, 10 aa, synthetic construct
ENIRGDRTNL

SEQ ID NO: 140747 - protein, 10 aa, synthetic construct
ENMRGDRTNL

SEQ ID NO: 140748 - protein, 10 aa, synthetic construct
ENWRGDRTNL

SEQ ID NO: 140749 - protein, 10 aa, synthetic construct
ENFRGDRTNL

SEQ ID NO: 140750 - protein, 10 aa, synthetic construct
ENKRGDRTNL

SEQ ID NO: 140751 - protein, 10 aa, synthetic construct
ENRRGDRTNL

SEQ ID NO: 140752 - protein, 10 aa, synthetic construct
ENHRGDRTNL

SEQ ID NO: 140753 - protein, 10 aa, synthetic construct
ENSRGDRTNL

SEQ ID NO: 140754 - protein, 10 aa, synthetic construct
ENTRGDRTNL

SEQ ID NO: 140755 - protein, 10 aa, synthetic construct
ENYRGDRTNL

SEQ ID NO: 140756 - protein, 10 aa, synthetic construct
ENNRGDRTNL

SEQ ID NO: 140757 - protein, 10 aa, synthetic construct
ENQRGDRTNL

SEQ ID NO: 140758 - protein, 10 aa, synthetic construct
ENDRGDRTNL

SEQ ID NO: 140759 - protein, 10 aa, synthetic construct
ENERGDRTNL

SEQ ID NO: 140760 - protein, 10 aa, synthetic construct
EQGRGDRTNL

SEQ ID NO: 140761 - protein, 10 aa, synthetic construct
EQARGDRTNL

SEQ ID NO: 140762 - protein, 10 aa, synthetic construct
EQVRGDRTNL

SEQ ID NO: 140763 - protein, 10 aa, synthetic construct
EQPRGDRTNL

SEQ ID NO: 140764 - protein, 10 aa, synthetic construct
EQLRGDRTNL

SEQ ID NO: 140765 - protein, 10 aa, synthetic construct
EQIRGDRTNL

SEQ ID NO: 140766 - protein, 10 aa, synthetic construct
EQMRGDRTNL

SEQ ID NO: 140767 - protein, 10 aa, synthetic construct
EQWRGDRTNL

SEQ ID NO: 140768 - protein, 10 aa, synthetic construct
EQFRGDRTNL

SEQ ID NO: 140769 - protein, 10 aa, synthetic construct
EQKRGDRTNL

SEQ ID NO: 140770 - protein, 10 aa, synthetic construct
EQRRGDRTNL

SEQ ID NO: 140771 - protein, 10 aa, synthetic construct
EQHRGDRTNL

SEQ ID NO: 140772 - protein, 10 aa, synthetic construct
EQSRGDRTNL

SEQ ID NO: 140773 - protein, 10 aa, synthetic construct
EQTRGDRTNL

SEQ ID NO: 140774 - protein, 10 aa, synthetic construct
EQYRGDRTNL

SEQ ID NO: 140775 - protein, 10 aa, synthetic construct
EQNRGDRTNL

SEQ ID NO: 140776 - protein, 10 aa, synthetic construct
EQQRGDRTNL

SEQ ID NO: 140777 - protein, 10 aa, synthetic construct
EQDRGDRTNL

SEQ ID NO: 140778 - protein, 10 aa, synthetic construct
EQERGDRTNL

SEQ ID NO: 140779 - protein, 10 aa, synthetic construct
EDGRGDRTNL

SEQ ID NO: 140780 - protein, 10 aa, synthetic construct
EDARGDRTNL

SEQ ID NO: 140781 - protein, 10 aa, synthetic construct
EDVRGDRTNL

SEQ ID NO: 140782 - protein, 10 aa, synthetic construct
EDPRGDRTNL

SEQ ID NO: 140783 - protein, 10 aa, synthetic construct
EDLRGDRTNL

SEQ ID NO: 140784 - protein, 10 aa, synthetic construct
EDIRGDRTNL

SEQ ID NO: 140785 - protein, 10 aa, synthetic construct
EDMRGDRTNL

SEQ ID NO: 140786 - protein, 10 aa, synthetic construct
EDWRGDRTNL

SEQ ID NO: 140787 - protein, 10 aa, synthetic construct
EDFRGDRTNL

SEQ ID NO: 140788 - protein, 10 aa, synthetic construct
EDKRGDRTNL

SEQ ID NO: 140789 - protein, 10 aa, synthetic construct
EDRRGDRTNL

SEQ ID NO: 140790 - protein, 10 aa, synthetic construct
EDHRGDRTNL

SEQ ID NO: 140791 - protein, 10 aa, synthetic construct
EDSRGDRTNL

SEQ ID NO: 140792 - protein, 10 aa, synthetic construct
EDTRGDRTNL

SEQ ID NO: 140793 - protein, 10 aa, synthetic construct
EDYRGDRTNL

SEQ ID NO: 140794 - protein, 10 aa, synthetic construct
EDNRGDRTNL

SEQ ID NO: 140795 - protein, 10 aa, synthetic construct
EDQRGDRTNL

SEQ ID NO: 140796 - protein, 10 aa, synthetic construct
EDDRGDRTNL

SEQ ID NO: 140797 - protein, 10 aa, synthetic construct
EDERGDRTNL

SEQ ID NO: 140798 - protein, 10 aa, synthetic construct
EEGRGDRTNL

SEQ ID NO: 140799 - protein, 10 aa, synthetic construct
EEARGDRTNL

SEQ ID NO: 140800 - protein, 10 aa, synthetic construct
EEVRGDRTNL

SEQ ID NO: 140801 - protein, 10 aa, synthetic construct
EEPRGDRTNL

SEQ ID NO: 140802 - protein, 10 aa, synthetic construct
EELRGDRTNL

SEQ ID NO: 140803 - protein, 10 aa, synthetic construct
EEIRGDRTNL

SEQ ID NO: 140804 - protein, 10 aa, synthetic construct
EEMRGDRTNL

SEQ ID NO: 140805 - protein, 10 aa, synthetic construct
EEWRGDRTNL

SEQ ID NO: 140806 - protein, 10 aa, synthetic construct
EEFRGDRTNL

SEQ ID NO: 140807 - protein, 10 aa, synthetic construct
EEKRGDRTNL

SEQ ID NO: 140808 - protein, 10 aa, synthetic construct
EERRGDRTNL

SEQ ID NO: 140809 - protein, 10 aa, synthetic construct
EEHRGDRTNL

SEQ ID NO: 140810 - protein, 10 aa, synthetic construct
EESRGDRTNL

SEQ ID NO: 140811 - protein, 10 aa, synthetic construct
EETRGDRTNL

SEQ ID NO: 140812 - protein, 10 aa, synthetic construct
EEYRGDRTNL

SEQ ID NO: 140813 - protein, 10 aa, synthetic construct
EENRGDRTNL

SEQ ID NO: 140814 - protein, 10 aa, synthetic construct
EEQRGDRTNL

SEQ ID NO: 140815 - protein, 10 aa, synthetic construct
EEDRGDRTNL

SEQ ID NO: 140816 - protein, 10 aa, synthetic construct
EEERGDRTNL

SEQ ID NO: 140817 - protein, 10 aa, synthetic construct
NGGRGDRTNL

SEQ ID NO: 140818 - protein, 10 aa, synthetic construct
NGARGDRTNL

SEQ ID NO: 140819 - protein, 10 aa, synthetic construct
NGVRGDRTNL

SEQ ID NO: 140820 - protein, 10 aa, synthetic construct
NGPRGDRTNL

SEQ ID NO: 140821 - protein, 10 aa, synthetic construct
NGLRGDRTNL

SEQ ID NO: 140822 - protein, 10 aa, synthetic construct
NGIRGDRTNL

SEQ ID NO: 140823 - protein, 10 aa, synthetic construct
NGMRGDRTNL

SEQ ID NO: 140824 - protein, 10 aa, synthetic construct
NGWRGDRTNL

SEQ ID NO: 140825 - protein, 10 aa, synthetic construct
NGFRGDRTNL

SEQ ID NO: 140826 - protein, 10 aa, synthetic construct
NGKRGDRTNL

SEQ ID NO: 140827 - protein, 10 aa, synthetic construct
NGRRGDRTNL

SEQ ID NO: 140828 - protein, 10 aa, synthetic construct
NGHRGDRTNL

SEQ ID NO: 140829 - protein, 10 aa, synthetic construct
NGSRGDRTNL

SEQ ID NO: 140830 - protein, 10 aa, synthetic construct
NGTRGDRTNL

SEQ ID NO: 140831 - protein, 10 aa, synthetic construct
NGYRGDRTNL

SEQ ID NO: 140832 - protein, 10 aa, synthetic construct
NGNRGDRTNL

SEQ ID NO: 140833 - protein, 10 aa, synthetic construct
NGQRGDRTNL

SEQ ID NO: 140834 - protein, 10 aa, synthetic construct
NGDRGDRTNL

SEQ ID NO: 140835 - protein, 10 aa, synthetic construct
NGERGDRTNL

SEQ ID NO: 140836 - protein, 10 aa, synthetic construct
NAGRGDRTNL

SEQ ID NO: 140837 - protein, 10 aa, synthetic construct
NAARGDRTNL

SEQ ID NO: 140838 - protein, 10 aa, synthetic construct
NAVRGDRTNL

SEQ ID NO: 140839 - protein, 10 aa, synthetic construct
NAPRGDRTNL

SEQ ID NO: 140840 - protein, 10 aa, synthetic construct
NALRGDRTNL

SEQ ID NO: 140841 - protein, 10 aa, synthetic construct
NAIRGDRTNL

SEQ ID NO: 140842 - protein, 10 aa, synthetic construct
NAMRGDRTNL

SEQ ID NO: 140843 - protein, 10 aa, synthetic construct
NAWRGDRTNL

SEQ ID NO: 140844 - protein, 10 aa, synthetic construct
NAFRGDRTNL

SEQ ID NO: 140845 - protein, 10 aa, synthetic construct
NAKRGDRTNL

SEQ ID NO: 140846 - protein, 10 aa, synthetic construct
NARRGDRTNL

SEQ ID NO: 140847 - protein, 10 aa, synthetic construct
NAHRGDRTNL

SEQ ID NO: 140848 - protein, 10 aa, synthetic construct
NASRGDRTNL

SEQ ID NO: 140849 - protein, 10 aa, synthetic construct
NATRGDRTNL

SEQ ID NO: 140850 - protein, 10 aa, synthetic construct
NAYRGDRTNL

SEQ ID NO: 140851 - protein, 10 aa, synthetic construct
NANRGDRTNL

SEQ ID NO: 140852 - protein, 10 aa, synthetic construct
NAQRGDRTNL

SEQ ID NO: 140853 - protein, 10 aa, synthetic construct
NADRGDRTNL

SEQ ID NO: 140854 - protein, 10 aa, synthetic construct
NAERGDRTNL

SEQ ID NO: 140855 - protein, 10 aa, synthetic construct
NVGRGDRTNL

SEQ ID NO: 140856 - protein, 10 aa, synthetic construct
NVARGDRTNL

SEQ ID NO: 140857 - protein, 10 aa, synthetic construct
NVVRGDRTNL

SEQ ID NO: 140858 - protein, 10 aa, synthetic construct
NVPRGDRTNL

SEQ ID NO: 140859 - protein, 10 aa, synthetic construct
NVLRGDRTNL

SEQ ID NO: 140860 - protein, 10 aa, synthetic construct
NVIRGDRTNL

SEQ ID NO: 140861 - protein, 10 aa, synthetic construct
NVMRGDRTNL

SEQ ID NO: 140862 - protein, 10 aa, synthetic construct
NVWRGDRTNL

SEQ ID NO: 140863 - protein, 10 aa, synthetic construct
NVFRGDRTNL

SEQ ID NO: 140864 - protein, 10 aa, synthetic construct
NVKRGDRTNL

SEQ ID NO: 140865 - protein, 10 aa, synthetic construct
NVRRGDRTNL

SEQ ID NO: 140866 - protein, 10 aa, synthetic construct
NVHRGDRTNL

SEQ ID NO: 140867 - protein, 10 aa, synthetic construct
NVSRGDRTNL

SEQ ID NO: 140868 - protein, 10 aa, synthetic construct
NVTRGDRTNL

SEQ ID NO: 140869 - protein, 10 aa, synthetic construct
NVYRGDRTNL

SEQ ID NO: 140870 - protein, 10 aa, synthetic construct
NVNRGDRTNL

SEQ ID NO: 140871 - protein, 10 aa, synthetic construct
NVQRGDRTNL

SEQ ID NO: 140872 - protein, 10 aa, synthetic construct
NVDRGDRTNL

SEQ ID NO: 140873 - protein, 10 aa, synthetic construct
NVERGDRTNL

SEQ ID NO: 140874 - protein, 10 aa, synthetic construct
NPGRGDRTNL

SEQ ID NO: 140875 - protein, 10 aa, synthetic construct
NPARGDRTNL

SEQ ID NO: 140876 - protein, 10 aa, synthetic construct
NPVRGDRTNL

SEQ ID NO: 140877 - protein, 10 aa, synthetic construct
NPPRGDRTNL

SEQ ID NO: 140878 - protein, 10 aa, synthetic construct
NPLRGDRTNL

SEQ ID NO: 140879 - protein, 10 aa, synthetic construct
NPIRGDRTNL

SEQ ID NO: 140880 - protein, 10 aa, synthetic construct
NPMRGDRTNL

SEQ ID NO: 140881 - protein, 10 aa, synthetic construct
NPWRGDRTNL

SEQ ID NO: 140882 - protein, 10 aa, synthetic construct
NPFRGDRTNL

SEQ ID NO: 140883 - protein, 10 aa, synthetic construct
NPKRGDRTNL

SEQ ID NO: 140884 - protein, 10 aa, synthetic construct
NPRRGDRTNL

SEQ ID NO: 140885 - protein, 10 aa, synthetic construct
NPHRGDRTNL

SEQ ID NO: 140886 - protein, 10 aa, synthetic construct
NPSRGDRTNL

SEQ ID NO: 140887 - protein, 10 aa, synthetic construct
NPTRGDRTNL

SEQ ID NO: 140888 - protein, 10 aa, synthetic construct
NPYRGDRTNL

SEQ ID NO: 140889 - protein, 10 aa, synthetic construct
NPNRGDRTNL

SEQ ID NO: 140890 - protein, 10 aa, synthetic construct
NPQRGDRTNL

SEQ ID NO: 140891 - protein, 10 aa, synthetic construct
NPDRGDRTNL

SEQ ID NO: 140892 - protein, 10 aa, synthetic construct
NPERGDRTNL

SEQ ID NO: 140893 - protein, 10 aa, synthetic construct
NLGRGDRTNL

SEQ ID NO: 140894 - protein, 10 aa, synthetic construct
NLARGDRTNL

SEQ ID NO: 140895 - protein, 10 aa, synthetic construct
NLVRGDRTNL

SEQ ID NO: 140896 - protein, 10 aa, synthetic construct
NLPRGDRTNL

SEQ ID NO: 140897 - protein, 10 aa, synthetic construct
NLLRGDRTNL

SEQ ID NO: 140898 - protein, 10 aa, synthetic construct
NLIRGDRTNL

SEQ ID NO: 140899 - protein, 10 aa, synthetic construct
NLMRGDRTNL

SEQ ID NO: 140900 - protein, 10 aa, synthetic construct
NLWRGDRTNL

SEQ ID NO: 140901 - protein, 10 aa, synthetic construct
NLFRGDRTNL

SEQ ID NO: 140902 - protein, 10 aa, synthetic construct
NLKRGDRTNL

SEQ ID NO: 140903 - protein, 10 aa, synthetic construct
NLRRGDRTNL

SEQ ID NO: 140904 - protein, 10 aa, synthetic construct
NLHRGDRTNL

SEQ ID NO: 140905 - protein, 10 aa, synthetic construct
NLSRGDRTNL

SEQ ID NO: 140906 - protein, 10 aa, synthetic construct
NLTRGDRTNL

SEQ ID NO: 140907 - protein, 10 aa, synthetic construct
NLYRGDRTNL

SEQ ID NO: 140908 - protein, 10 aa, synthetic construct
NLNRGDRTNL

SEQ ID NO: 140909 - protein, 10 aa, synthetic construct
NLQRGDRTNL

SEQ ID NO: 140910 - protein, 10 aa, synthetic construct
NLDRGDRTNL

SEQ ID NO: 140911 - protein, 10 aa, synthetic construct
NLERGDRTNL

SEQ ID NO: 140912 - protein, 10 aa, synthetic construct
NIGRGDRTNL

SEQ ID NO: 140913 - protein, 10 aa, synthetic construct
NIARGDRTNL

SEQ ID NO: 140914 - protein, 10 aa, synthetic construct
NIVRGDRTNL

SEQ ID NO: 140915 - protein, 10 aa, synthetic construct
NIPRGDRTNL

SEQ ID NO: 140916 - protein, 10 aa, synthetic construct
NILRGDRTNL

SEQ ID NO: 140917 - protein, 10 aa, synthetic construct
NIIRGDRTNL

SEQ ID NO: 140918 - protein, 10 aa, synthetic construct
NIMRGDRTNL

SEQ ID NO: 140919 - protein, 10 aa, synthetic construct
NIWRGDRTNL

SEQ ID NO: 140920 - protein, 10 aa, synthetic construct
NIFRGDRTNL

SEQ ID NO: 140921 - protein, 10 aa, synthetic construct
NIKRGDRTNL

SEQ ID NO: 140922 - protein, 10 aa, synthetic construct
NIRRGDRTNL

SEQ ID NO: 140923 - protein, 10 aa, synthetic construct
NIHRGDRTNL

SEQ ID NO: 140924 - protein, 10 aa, synthetic construct
NISRGDRTNL

SEQ ID NO: 140925 - protein, 10 aa, synthetic construct
NITRGDRTNL

SEQ ID NO: 140926 - protein, 10 aa, synthetic construct
NIYRGDRTNL

SEQ ID NO: 140927 - protein, 10 aa, synthetic construct
NINRGDRTNL

SEQ ID NO: 140928 - protein, 10 aa, synthetic construct
NIQRGDRTNL

SEQ ID NO: 140929 - protein, 10 aa, synthetic construct
NIDRGDRTNL

SEQ ID NO: 140930 - protein, 10 aa, synthetic construct
NIERGDRTNL

SEQ ID NO: 140931 - protein, 10 aa, synthetic construct
NMGRGDRTNL

SEQ ID NO: 140932 - protein, 10 aa, synthetic construct
NMARGDRTNL

SEQ ID NO: 140933 - protein, 10 aa, synthetic construct
NMVRGDRTNL

SEQ ID NO: 140934 - protein, 10 aa, synthetic construct
NMPRGDRTNL

SEQ ID NO: 140935 - protein, 10 aa, synthetic construct
NMLRGDRTNL

SEQ ID NO: 140936 - protein, 10 aa, synthetic construct
NMIRGDRTNL

SEQ ID NO: 140937 - protein, 10 aa, synthetic construct
NMMRGDRTNL

SEQ ID NO: 140938 - protein, 10 aa, synthetic construct
NMWRGDRTNL

SEQ ID NO: 140939 - protein, 10 aa, synthetic construct
NMFRGDRTNL

SEQ ID NO: 140940 - protein, 10 aa, synthetic construct
NMKRGDRTNL

SEQ ID NO: 140941 - protein, 10 aa, synthetic construct
NMRRGDRTNL

SEQ ID NO: 140942 - protein, 10 aa, synthetic construct
NMHRGDRTNL

SEQ ID NO: 140943 - protein, 10 aa, synthetic construct
NMSRGDRTNL

SEQ ID NO: 140944 - protein, 10 aa, synthetic construct
NMTRGDRTNL

SEQ ID NO: 140945 - protein, 10 aa, synthetic construct
NMYRGDRTNL

SEQ ID NO: 140946 - protein, 10 aa, synthetic construct
NMNRGDRTNL

SEQ ID NO: 140947 - protein, 10 aa, synthetic construct
NMQRGDRTNL

SEQ ID NO: 140948 - protein, 10 aa, synthetic construct
NMDRGDRTNL

SEQ ID NO: 140949 - protein, 10 aa, synthetic construct
NMERGDRTNL

SEQ ID NO: 140950 - protein, 10 aa, synthetic construct
NWGRGDRTNL

SEQ ID NO: 140951 - protein, 10 aa, synthetic construct
NWARGDRTNL

SEQ ID NO: 140952 - protein, 10 aa, synthetic construct
NWVRGDRTNL

SEQ ID NO: 140953 - protein, 10 aa, synthetic construct
NWPRGDRTNL

SEQ ID NO: 140954 - protein, 10 aa, synthetic construct
NWLRGDRTNL

SEQ ID NO: 140955 - protein, 10 aa, synthetic construct
NWIRGDRTNL

SEQ ID NO: 140956 - protein, 10 aa, synthetic construct
NWMRGDRTNL

SEQ ID NO: 140957 - protein, 10 aa, synthetic construct
NWWRGDRTNL

SEQ ID NO: 140958 - protein, 10 aa, synthetic construct
NWFRGDRTNL

SEQ ID NO: 140959 - protein, 10 aa, synthetic construct
NWKRGDRTNL

SEQ ID NO: 140960 - protein, 10 aa, synthetic construct
NWRRGDRTNL

SEQ ID NO: 140961 - protein, 10 aa, synthetic construct
NWHRGDRTNL

SEQ ID NO: 140962 - protein, 10 aa, synthetic construct
NWSRGDRTNL

SEQ ID NO: 140963 - protein, 10 aa, synthetic construct
NWTRGDRTNL

SEQ ID NO: 140964 - protein, 10 aa, synthetic construct
NWYRGDRTNL

SEQ ID NO: 140965 - protein, 10 aa, synthetic construct
NWNRGDRTNL

SEQ ID NO: 140966 - protein, 10 aa, synthetic construct
NWQRGDRTNL

SEQ ID NO: 140967 - protein, 10 aa, synthetic construct
NWDRGDRTNL

SEQ ID NO: 140968 - protein, 10 aa, synthetic construct
NWERGDRTNL

SEQ ID NO: 140969 - protein, 10 aa, synthetic construct
NFGRGDRTNL

SEQ ID NO: 140970 - protein, 10 aa, synthetic construct
NFARGDRTNL

SEQ ID NO: 140971 - protein, 10 aa, synthetic construct
NFVRGDRTNL

SEQ ID NO: 140972 - protein, 10 aa, synthetic construct
NFPRGDRTNL

SEQ ID NO: 140973 - protein, 10 aa, synthetic construct
NFLRGDRTNL

SEQ ID NO: 140974 - protein, 10 aa, synthetic construct
NFIRGDRTNL

SEQ ID NO: 140975 - protein, 10 aa, synthetic construct
NFMRGDRTNL

SEQ ID NO: 140976 - protein, 10 aa, synthetic construct
NFWRGDRTNL

SEQ ID NO: 140977 - protein, 10 aa, synthetic construct
NFFRGDRTNL

SEQ ID NO: 140978 - protein, 10 aa, synthetic construct
NFKRGDRTNL

SEQ ID NO: 140979 - protein, 10 aa, synthetic construct
NFRRGDRTNL

SEQ ID NO: 140980 - protein, 10 aa, synthetic construct
NFHRGDRTNL

SEQ ID NO: 140981 - protein, 10 aa, synthetic construct
NFSRGDRTNL

SEQ ID NO: 140982 - protein, 10 aa, synthetic construct
NFTRGDRTNL

SEQ ID NO: 140983 - protein, 10 aa, synthetic construct
NFYRGDRTNL

SEQ ID NO: 140984 - protein, 10 aa, synthetic construct
NFNRGDRTNL

SEQ ID NO: 140985 - protein, 10 aa, synthetic construct
NFQRGDRTNL

SEQ ID NO: 140986 - protein, 10 aa, synthetic construct
NFDRGDRTNL

SEQ ID NO: 140987 - protein, 10 aa, synthetic construct
NFERGDRTNL

SEQ ID NO: 140988 - protein, 10 aa, synthetic construct
NKGRGDRTNL

SEQ ID NO: 140989 - protein, 10 aa, synthetic construct
NKARGDRTNL

SEQ ID NO: 140990 - protein, 10 aa, synthetic construct
NKVRGDRTNL

SEQ ID NO: 140991 - protein, 10 aa, synthetic construct
NKPRGDRTNL

SEQ ID NO: 140992 - protein, 10 aa, synthetic construct
NKLRGDRTNL

SEQ ID NO: 140993 - protein, 10 aa, synthetic construct
NKIRGDRTNL

SEQ ID NO: 140994 - protein, 10 aa, synthetic construct
NKMRGDRTNL

SEQ ID NO: 140995 - protein, 10 aa, synthetic construct
NKWRGDRTNL

SEQ ID NO: 140996 - protein, 10 aa, synthetic construct
NKFRGDRTNL

SEQ ID NO: 140997 - protein, 10 aa, synthetic construct
NKKRGDRTNL

SEQ ID NO: 140998 - protein, 10 aa, synthetic construct
NKRRGDRTNL

SEQ ID NO: 140999 - protein, 10 aa, synthetic construct
NKHRGDRTNL

SEQ ID NO: 141000 - protein, 10 aa, synthetic construct
NKSRGDRTNL

SEQ ID NO: 141001 - protein, 10 aa, synthetic construct
NKTRGDRTNL

SEQ ID NO: 141002 - protein, 10 aa, synthetic construct
NKYRGDRTNL

SEQ ID NO: 141003 - protein, 10 aa, synthetic construct
NKNRGDRTNL

SEQ ID NO: 141004 - protein, 10 aa, synthetic construct
NKQRGDRTNL

SEQ ID NO: 141005 - protein, 10 aa, synthetic construct
NKDRGDRTNL

SEQ ID NO: 141006 - protein, 10 aa, synthetic construct
NKERGDRTNL

SEQ ID NO: 141007 - protein, 10 aa, synthetic construct
NRGRGDRTNL

SEQ ID NO: 141008 - protein, 10 aa, synthetic construct
NRARGDRTNL

SEQ ID NO: 141009 - protein, 10 aa, synthetic construct
NRVRGDRTNL

SEQ ID NO: 141010 - protein, 10 aa, synthetic construct
NRPRGDRTNL

SEQ ID NO: 141011 - protein, 10 aa, synthetic construct
NRLRGDRTNL

SEQ ID NO: 141012 - protein, 10 aa, synthetic construct
NRIRGDRTNL

SEQ ID NO: 141013 - protein, 10 aa, synthetic construct
NRMRGDRTNL

SEQ ID NO: 141014 - protein, 10 aa, synthetic construct
NRWRGDRTNL

SEQ ID NO: 141015 - protein, 10 aa, synthetic construct
NRFRGDRTNL

SEQ ID NO: 141016 - protein, 10 aa, synthetic construct
NRKRGDRTNL

SEQ ID NO: 141017 - protein, 10 aa, synthetic construct
NRRRGDRTNL

SEQ ID NO: 141018 - protein, 10 aa, synthetic construct
NRHRGDRTNL

SEQ ID NO: 141019 - protein, 10 aa, synthetic construct
NRSRGDRTNL

SEQ ID NO: 141020 - protein, 10 aa, synthetic construct
NRTRGDRTNL

SEQ ID NO: 141021 - protein, 10 aa, synthetic construct
NRYRGDRTNL

SEQ ID NO: 141022 - protein, 10 aa, synthetic construct
NRNRGDRTNL

SEQ ID NO: 141023 - protein, 10 aa, synthetic construct
NRQRGDRTNL

SEQ ID NO: 141024 - protein, 10 aa, synthetic construct
NRDRGDRTNL

SEQ ID NO: 141025 - protein, 10 aa, synthetic construct
NRERGDRTNL

SEQ ID NO: 141026 - protein, 10 aa, synthetic construct
NHGRGDRTNL

SEQ ID NO: 141027 - protein, 10 aa, synthetic construct
NHARGDRTNL

SEQ ID NO: 141028 - protein, 10 aa, synthetic construct
NHVRGDRTNL

SEQ ID NO: 141029 - protein, 10 aa, synthetic construct
NHPRGDRTNL

SEQ ID NO: 141030 - protein, 10 aa, synthetic construct
NHLRGDRTNL

SEQ ID NO: 141031 - protein, 10 aa, synthetic construct
NHIRGDRTNL

SEQ ID NO: 141032 - protein, 10 aa, synthetic construct
NHMRGDRTNL

SEQ ID NO: 141033 - protein, 10 aa, synthetic construct
NHWRGDRTNL

SEQ ID NO: 141034 - protein, 10 aa, synthetic construct
NHFRGDRTNL

SEQ ID NO: 141035 - protein, 10 aa, synthetic construct
NHKRGDRTNL

SEQ ID NO: 141036 - protein, 10 aa, synthetic construct
NHRRGDRTNL

SEQ ID NO: 141037 - protein, 10 aa, synthetic construct
NHHRGDRTNL

SEQ ID NO: 141038 - protein, 10 aa, synthetic construct
NHSRGDRTNL

SEQ ID NO: 141039 - protein, 10 aa, synthetic construct
NHTRGDRTNL

SEQ ID NO: 141040 - protein, 10 aa, synthetic construct
NHYRGDRTNL

SEQ ID NO: 141041 - protein, 10 aa, synthetic construct
NHNRGDRTNL

SEQ ID NO: 141042 - protein, 10 aa, synthetic construct
NHQRGDRTNL

SEQ ID NO: 141043 - protein, 10 aa, synthetic construct
NHDRGDRTNL

SEQ ID NO: 141044 - protein, 10 aa, synthetic construct
NHERGDRTNL

SEQ ID NO: 141045 - protein, 10 aa, synthetic construct
NSGRGDRTNL

SEQ ID NO: 141046 - protein, 10 aa, synthetic construct
NSARGDRTNL

SEQ ID NO: 141047 - protein, 10 aa, synthetic construct
NSVRGDRTNL

SEQ ID NO: 141048 - protein, 10 aa, synthetic construct
NSPRGDRTNL

SEQ ID NO: 141049 - protein, 10 aa, synthetic construct
NSLRGDRTNL

SEQ ID NO: 141050 - protein, 10 aa, synthetic construct
NSIRGDRTNL

SEQ ID NO: 141051 - protein, 10 aa, synthetic construct
NSMRGDRTNL

SEQ ID NO: 141052 - protein, 10 aa, synthetic construct
NSWRGDRTNL

SEQ ID NO: 141053 - protein, 10 aa, synthetic construct
NSFRGDRTNL

SEQ ID NO: 141054 - protein, 10 aa, synthetic construct
NSKRGDRTNL

SEQ ID NO: 141055 - protein, 10 aa, synthetic construct
NSRRGDRTNL

SEQ ID NO: 141056 - protein, 10 aa, synthetic construct
NSHRGDRTNL

SEQ ID NO: 141057 - protein, 10 aa, synthetic construct
NSSRGDRTNL

SEQ ID NO: 141058 - protein, 10 aa, synthetic construct
NSTRGDRTNL

SEQ ID NO: 141059 - protein, 10 aa, synthetic construct
NSYRGDRTNL

SEQ ID NO: 141060 - protein, 10 aa, synthetic construct
NSNRGDRTNL

SEQ ID NO: 141061 - protein, 10 aa, synthetic construct
NSQRGDRTNL

SEQ ID NO: 141062 - protein, 10 aa, synthetic construct
NSDRGDRTNL

SEQ ID NO: 141063 - protein, 10 aa, synthetic construct
NSERGDRTNL

SEQ ID NO: 141064 - protein, 10 aa, synthetic construct
NTGRGDRTNL

SEQ ID NO: 141065 - protein, 10 aa, synthetic construct
NTARGDRTNL

SEQ ID NO: 141066 - protein, 10 aa, synthetic construct
NTVRGDRTNL

SEQ ID NO: 141067 - protein, 10 aa, synthetic construct
NTPRGDRTNL

SEQ ID NO: 141068 - protein, 10 aa, synthetic construct
NTLRGDRTNL

SEQ ID NO: 141069 - protein, 10 aa, synthetic construct
NTIRGDRTNL

SEQ ID NO: 141070 - protein, 10 aa, synthetic construct
NTMRGDRTNL

SEQ ID NO: 141071 - protein, 10 aa, synthetic construct
NTWRGDRTNL

SEQ ID NO: 141072 - protein, 10 aa, synthetic construct
NTFRGDRTNL

SEQ ID NO: 141073 - protein, 10 aa, synthetic construct
NTKRGDRTNL

SEQ ID NO: 141074 - protein, 10 aa, synthetic construct
NTRRGDRTNL

SEQ ID NO: 141075 - protein, 10 aa, synthetic construct
NTHRGDRTNL

SEQ ID NO: 141076 - protein, 10 aa, synthetic construct
NTSRGDRTNL

SEQ ID NO: 141077 - protein, 10 aa, synthetic construct
NTTRGDRTNL

SEQ ID NO: 141078 - protein, 10 aa, synthetic construct
NTYRGDRTNL

SEQ ID NO: 141079 - protein, 10 aa, synthetic construct
NTNRGDRTNL

SEQ ID NO: 141080 - protein, 10 aa, synthetic construct
NTQRGDRTNL

SEQ ID NO: 141081 - protein, 10 aa, synthetic construct
NTDRGDRTNL

SEQ ID NO: 141082 - protein, 10 aa, synthetic construct
NTERGDRTNL

SEQ ID NO: 141083 - protein, 10 aa, synthetic construct
NYGRGDRTNL

SEQ ID NO: 141084 - protein, 10 aa, synthetic construct
NYARGDRTNL

SEQ ID NO: 141085 - protein, 10 aa, synthetic construct
NYVRGDRTNL

SEQ ID NO: 141086 - protein, 10 aa, synthetic construct
NYPRGDRTNL

SEQ ID NO: 141087 - protein, 10 aa, synthetic construct
NYLRGDRTNL

SEQ ID NO: 141088 - protein, 10 aa, synthetic construct
NYIRGDRTNL

SEQ ID NO: 141089 - protein, 10 aa, synthetic construct
NYMRGDRTNL

SEQ ID NO: 141090 - protein, 10 aa, synthetic construct
NYWRGDRTNL

SEQ ID NO: 141091 - protein, 10 aa, synthetic construct
NYFRGDRTNL

SEQ ID NO: 141092 - protein, 10 aa, synthetic construct
NYKRGDRTNL

SEQ ID NO: 141093 - protein, 10 aa, synthetic construct
NYRRGDRTNL

SEQ ID NO: 141094 - protein, 10 aa, synthetic construct
NYHRGDRTNL

SEQ ID NO: 141095 - protein, 10 aa, synthetic construct
NYSRGDRTNL

SEQ ID NO: 141096 - protein, 10 aa, synthetic construct
NYTRGDRTNL

SEQ ID NO: 141097 - protein, 10 aa, synthetic construct
NYYRGDRTNL

SEQ ID NO: 141098 - protein, 10 aa, synthetic construct
NYNRGDRTNL

SEQ ID NO: 141099 - protein, 10 aa, synthetic construct
NYQRGDRTNL

SEQ ID NO: 141100 - protein, 10 aa, synthetic construct
NYDRGDRTNL

SEQ ID NO: 141101 - protein, 10 aa, synthetic construct
NYERGDRTNL

SEQ ID NO: 141102 - protein, 10 aa, synthetic construct
NNGRGDRTNL

SEQ ID NO: 141103 - protein, 10 aa, synthetic construct
NNARGDRTNL

SEQ ID NO: 141104 - protein, 10 aa, synthetic construct
NNVRGDRTNL

SEQ ID NO: 141105 - protein, 10 aa, synthetic construct
NNPRGDRTNL

SEQ ID NO: 141106 - protein, 10 aa, synthetic construct
NNLRGDRTNL

SEQ ID NO: 141107 - protein, 10 aa, synthetic construct
NNIRGDRTNL

SEQ ID NO: 141108 - protein, 10 aa, synthetic construct
NNMRGDRTNL

SEQ ID NO: 141109 - protein, 10 aa, synthetic construct
NNWRGDRTNL

SEQ ID NO: 141110 - protein, 10 aa, synthetic construct
NNFRGDRTNL

SEQ ID NO: 141111 - protein, 10 aa, synthetic construct
NNKRGDRTNL

SEQ ID NO: 141112 - protein, 10 aa, synthetic construct
NNRRGDRTNL

SEQ ID NO: 141113 - protein, 10 aa, synthetic construct
NNHRGDRTNL

SEQ ID NO: 141114 - protein, 10 aa, synthetic construct
NNSRGDRTNL

SEQ ID NO: 141115 - protein, 10 aa, synthetic construct
NNTRGDRTNL

SEQ ID NO: 141116 - protein, 10 aa, synthetic construct
NNYRGDRTNL

SEQ ID NO: 141117 - protein, 10 aa, synthetic construct
NNNRGDRTNL

SEQ ID NO: 141118 - protein, 10 aa, synthetic construct
NNQRGDRTNL

SEQ ID NO: 141119 - protein, 10 aa, synthetic construct
NNDRGDRTNL

SEQ ID NO: 141120 - protein, 10 aa, synthetic construct
NNERGDRTNL

SEQ ID NO: 141121 - protein, 10 aa, synthetic construct
NQGRGDRTNL

SEQ ID NO: 141122 - protein, 10 aa, synthetic construct
NQARGDRTNL

SEQ ID NO: 141123 - protein, 10 aa, synthetic construct
NQVRGDRTNL

SEQ ID NO: 141124 - protein, 10 aa, synthetic construct
NQPRGDRTNL

SEQ ID NO: 141125 - protein, 10 aa, synthetic construct
NQLRGDRTNL

SEQ ID NO: 141126 - protein, 10 aa, synthetic construct
NQIRGDRTNL

SEQ ID NO: 141127 - protein, 10 aa, synthetic construct
NQMRGDRTNL

SEQ ID NO: 141128 - protein, 10 aa, synthetic construct
NQWRGDRTNL

SEQ ID NO: 141129 - protein, 10 aa, synthetic construct
NQFRGDRTNL

SEQ ID NO: 141130 - protein, 10 aa, synthetic construct
NQKRGDRTNL

SEQ ID NO: 141131 - protein, 10 aa, synthetic construct
NQRRGDRTNL

SEQ ID NO: 141132 - protein, 10 aa, synthetic construct
NQHRGDRTNL

SEQ ID NO: 141133 - protein, 10 aa, synthetic construct
NQSRGDRTNL

SEQ ID NO: 141134 - protein, 10 aa, synthetic construct
NQTRGDRTNL

SEQ ID NO: 141135 - protein, 10 aa, synthetic construct
NQYRGDRTNL

SEQ ID NO: 141136 - protein, 10 aa, synthetic construct
NQNRGDRTNL

SEQ ID NO: 141137 - protein, 10 aa, synthetic construct
NQQRGDRTNL

SEQ ID NO: 141138 - protein, 10 aa, synthetic construct
NQDRGDRTNL

SEQ ID NO: 141139 - protein, 10 aa, synthetic construct
NQERGDRTNL

SEQ ID NO: 141140 - protein, 10 aa, synthetic construct
NDGRGDRTNL

SEQ ID NO: 141141 - protein, 10 aa, synthetic construct
NDARGDRTNL

SEQ ID NO: 141142 - protein, 10 aa, synthetic construct
NDVRGDRTNL

SEQ ID NO: 141143 - protein, 10 aa, synthetic construct
NDPRGDRTNL

SEQ ID NO: 141144 - protein, 10 aa, synthetic construct
NDLRGDRTNL

SEQ ID NO: 141145 - protein, 10 aa, synthetic construct
NDIRGDRTNL

SEQ ID NO: 141146 - protein, 10 aa, synthetic construct
NDMRGDRTNL

SEQ ID NO: 141147 - protein, 10 aa, synthetic construct
NDWRGDRTNL

SEQ ID NO: 141148 - protein, 10 aa, synthetic construct
NDFRGDRTNL

SEQ ID NO: 141149 - protein, 10 aa, synthetic construct
NDKRGDRTNL

SEQ ID NO: 141150 - protein, 10 aa, synthetic construct
NDRRGDRTNL

SEQ ID NO: 141151 - protein, 10 aa, synthetic construct
NDHRGDRTNL

SEQ ID NO: 141152 - protein, 10 aa, synthetic construct
NDSRGDRTNL

SEQ ID NO: 141153 - protein, 10 aa, synthetic construct
NDTRGDRTNL

SEQ ID NO: 141154 - protein, 10 aa, synthetic construct
NDYRGDRTNL

SEQ ID NO: 141155 - protein, 10 aa, synthetic construct
NDNRGDRTNL

SEQ ID NO: 141156 - protein, 10 aa, synthetic construct
NDQRGDRTNL

SEQ ID NO: 141157 - protein, 10 aa, synthetic construct
NDDRGDRTNL

SEQ ID NO: 141158 - protein, 10 aa, synthetic construct
NDERGDRTNL

SEQ ID NO: 141159 - protein, 10 aa, synthetic construct
NEGRGDRTNL

SEQ ID NO: 141160 - protein, 10 aa, synthetic construct
NEARGDRTNL

SEQ ID NO: 141161 - protein, 10 aa, synthetic construct
NEVRGDRTNL

SEQ ID NO: 141162 - protein, 10 aa, synthetic construct
NEPRGDRTNL

SEQ ID NO: 141163 - protein, 10 aa, synthetic construct
NELRGDRTNL

SEQ ID NO: 141164 - protein, 10 aa, synthetic construct
NEIRGDRTNL

SEQ ID NO: 141165 - protein, 10 aa, synthetic construct
NEMRGDRTNL

SEQ ID NO: 141166 - protein, 10 aa, synthetic construct
NEWRGDRTNL

SEQ ID NO: 141167 - protein, 10 aa, synthetic construct
NEFRGDRTNL

SEQ ID NO: 141168 - protein, 10 aa, synthetic construct
NEKRGDRTNL

SEQ ID NO: 141169 - protein, 10 aa, synthetic construct
NERRGDRTNL

SEQ ID NO: 141170 - protein, 10 aa, synthetic construct
NEHRGDRTNL

SEQ ID NO: 141171 - protein, 10 aa, synthetic construct
NESRGDRTNL

SEQ ID NO: 141172 - protein, 10 aa, synthetic construct
NETRGDRTNL

SEQ ID NO: 141173 - protein, 10 aa, synthetic construct
NEYRGDRTNL

SEQ ID NO: 141174 - protein, 10 aa, synthetic construct
NENRGDRTNL

SEQ ID NO: 141175 - protein, 10 aa, synthetic construct
NEQRGDRTNL

SEQ ID NO: 141176 - protein, 10 aa, synthetic construct
NEDRGDRTNL

SEQ ID NO: 141177 - protein, 10 aa, synthetic construct
NEERGDRTNL

SEQ ID NO: 141178 - protein, 10 aa, synthetic construct
DGGRGDRTNL

SEQ ID NO: 141179 - protein, 10 aa, synthetic construct
DGARGDRTNL

SEQ ID NO: 141180 - protein, 10 aa, synthetic construct
DGVRGDRTNL

SEQ ID NO: 141181 - protein, 10 aa, synthetic construct
DGPRGDRTNL

SEQ ID NO: 141182 - protein, 10 aa, synthetic construct
DGLRGDRTNL

SEQ ID NO: 141183 - protein, 10 aa, synthetic construct
DGIRGDRTNL

SEQ ID NO: 141184 - protein, 10 aa, synthetic construct
DGMRGDRTNL

SEQ ID NO: 141185 - protein, 10 aa, synthetic construct
DGWRGDRTNL

SEQ ID NO: 141186 - protein, 10 aa, synthetic construct
DGFRGDRTNL

SEQ ID NO: 141187 - protein, 10 aa, synthetic construct
DGKRGDRTNL

SEQ ID NO: 141188 - protein, 10 aa, synthetic construct
DGRRGDRTNL

SEQ ID NO: 141189 - protein, 10 aa, synthetic construct
DGHRGDRTNL

SEQ ID NO: 141190 - protein, 10 aa, synthetic construct
DGSRGDRTNL

SEQ ID NO: 141191 - protein, 10 aa, synthetic construct
DGTRGDRTNL

SEQ ID NO: 141192 - protein, 10 aa, synthetic construct
DGYRGDRTNL

SEQ ID NO: 141193 - protein, 10 aa, synthetic construct
DGNRGDRTNL

SEQ ID NO: 141194 - protein, 10 aa, synthetic construct
DGQRGDRTNL

SEQ ID NO: 141195 - protein, 10 aa, synthetic construct
DGDRGDRTNL

SEQ ID NO: 141196 - protein, 10 aa, synthetic construct
DGERGDRTNL

SEQ ID NO: 141197 - protein, 10 aa, synthetic construct
DAGRGDRTNL

SEQ ID NO: 141198 - protein, 10 aa, synthetic construct
DAARGDRTNL

SEQ ID NO: 141199 - protein, 10 aa, synthetic construct
DAVRGDRTNL

SEQ ID NO: 141200 - protein, 10 aa, synthetic construct
DAPRGDRTNL

SEQ ID NO: 141201 - protein, 10 aa, synthetic construct
DALRGDRTNL

SEQ ID NO: 141202 - protein, 10 aa, synthetic construct
DAIRGDRTNL

SEQ ID NO: 141203 - protein, 10 aa, synthetic construct
DAMRGDRTNL

SEQ ID NO: 141204 - protein, 10 aa, synthetic construct
DAWRGDRTNL

SEQ ID NO: 141205 - protein, 10 aa, synthetic construct
DAFRGDRTNL

SEQ ID NO: 141206 - protein, 10 aa, synthetic construct
DAKRGDRTNL

SEQ ID NO: 141207 - protein, 10 aa, synthetic construct
DARRGDRTNL

SEQ ID NO: 141208 - protein, 10 aa, synthetic construct
DAHRGDRTNL

SEQ ID NO: 141209 - protein, 10 aa, synthetic construct
DASRGDRTNL

SEQ ID NO: 141210 - protein, 10 aa, synthetic construct
DATRGDRTNL

SEQ ID NO: 141211 - protein, 10 aa, synthetic construct
DAYRGDRTNL

SEQ ID NO: 141212 - protein, 10 aa, synthetic construct
DANRGDRTNL

SEQ ID NO: 141213 - protein, 10 aa, synthetic construct
DAQRGDRTNL

SEQ ID NO: 141214 - protein, 10 aa, synthetic construct
DADRGDRTNL

SEQ ID NO: 141215 - protein, 10 aa, synthetic construct
DAERGDRTNL

SEQ ID NO: 141216 - protein, 10 aa, synthetic construct
DVGRGDRTNL

SEQ ID NO: 141217 - protein, 10 aa, synthetic construct
DVARGDRTNL

SEQ ID NO: 141218 - protein, 10 aa, synthetic construct
DVVRGDRTNL

SEQ ID NO: 141219 - protein, 10 aa, synthetic construct
DVPRGDRTNL

SEQ ID NO: 141220 - protein, 10 aa, synthetic construct
DVLRGDRTNL

SEQ ID NO: 141221 - protein, 10 aa, synthetic construct
DVIRGDRTNL

SEQ ID NO: 141222 - protein, 10 aa, synthetic construct
DVMRGDRTNL

SEQ ID NO: 141223 - protein, 10 aa, synthetic construct
DVWRGDRTNL

SEQ ID NO: 141224 - protein, 10 aa, synthetic construct
DVFRGDRTNL

SEQ ID NO: 141225 - protein, 10 aa, synthetic construct
DVKRGDRTNL

SEQ ID NO: 141226 - protein, 10 aa, synthetic construct
DVRRGDRTNL

SEQ ID NO: 141227 - protein, 10 aa, synthetic construct
DVHRGDRTNL

SEQ ID NO: 141228 - protein, 10 aa, synthetic construct
DVSRGDRTNL

SEQ ID NO: 141229 - protein, 10 aa, synthetic construct
DVTRGDRTNL

SEQ ID NO: 141230 - protein, 10 aa, synthetic construct
DVYRGDRTNL

SEQ ID NO: 141231 - protein, 10 aa, synthetic construct
DVNRGDRTNL

SEQ ID NO: 141232 - protein, 10 aa, synthetic construct
DVQRGDRTNL

SEQ ID NO: 141233 - protein, 10 aa, synthetic construct
DVDRGDRTNL

SEQ ID NO: 141234 - protein, 10 aa, synthetic construct
DVERGDRTNL

SEQ ID NO: 141235 - protein, 10 aa, synthetic construct
DPGRGDRTNL

SEQ ID NO: 141236 - protein, 10 aa, synthetic construct
DPARGDRTNL

SEQ ID NO: 141237 - protein, 10 aa, synthetic construct
DPVRGDRTNL

SEQ ID NO: 141238 - protein, 10 aa, synthetic construct
DPPRGDRTNL

SEQ ID NO: 141239 - protein, 10 aa, synthetic construct
DPLRGDRTNL

SEQ ID NO: 141240 - protein, 10 aa, synthetic construct
DPIRGDRTNL

SEQ ID NO: 141241 - protein, 10 aa, synthetic construct
DPMRGDRTNL

SEQ ID NO: 141242 - protein, 10 aa, synthetic construct
DPWRGDRTNL

SEQ ID NO: 141243 - protein, 10 aa, synthetic construct
DPFRGDRTNL

SEQ ID NO: 141244 - protein, 10 aa, synthetic construct
DPKRGDRTNL

SEQ ID NO: 141245 - protein, 10 aa, synthetic construct
DPRRGDRTNL

SEQ ID NO: 141246 - protein, 10 aa, synthetic construct
DPHRGDRTNL

SEQ ID NO: 141247 - protein, 10 aa, synthetic construct
DPSRGDRTNL

SEQ ID NO: 141248 - protein, 10 aa, synthetic construct
DPTRGDRTNL

SEQ ID NO: 141249 - protein, 10 aa, synthetic construct
DPYRGDRTNL

SEQ ID NO: 141250 - protein, 10 aa, synthetic construct
DPNRGDRTNL

SEQ ID NO: 141251 - protein, 10 aa, synthetic construct
DPQRGDRTNL

SEQ ID NO: 141252 - protein, 10 aa, synthetic construct
DPDRGDRTNL

SEQ ID NO: 141253 - protein, 10 aa, synthetic construct
DPERGDRTNL

SEQ ID NO: 141254 - protein, 10 aa, synthetic construct
DLGRGDRTNL

SEQ ID NO: 141255 - protein, 10 aa, synthetic construct
DLARGDRTNL

SEQ ID NO: 141256 - protein, 10 aa, synthetic construct
DLVRGDRTNL

SEQ ID NO: 141257 - protein, 10 aa, synthetic construct
DLPRGDRTNL

SEQ ID NO: 141258 - protein, 10 aa, synthetic construct
DLLRGDRTNL

SEQ ID NO: 141259 - protein, 10 aa, synthetic construct
DLIRGDRTNL

SEQ ID NO: 141260 - protein, 10 aa, synthetic construct
DLMRGDRTNL

SEQ ID NO: 141261 - protein, 10 aa, synthetic construct
DLWRGDRTNL

SEQ ID NO: 141262 - protein, 10 aa, synthetic construct
DLFRGDRTNL

SEQ ID NO: 141263 - protein, 10 aa, synthetic construct
DLKRGDRTNL

SEQ ID NO: 141264 - protein, 10 aa, synthetic construct
DLRRGDRTNL

SEQ ID NO: 141265 - protein, 10 aa, synthetic construct
DLHRGDRTNL

SEQ ID NO: 141266 - protein, 10 aa, synthetic construct
DLSRGDRTNL

SEQ ID NO: 141267 - protein, 10 aa, synthetic construct
DLTRGDRTNL

SEQ ID NO: 141268 - protein, 10 aa, synthetic construct
DLYRGDRTNL

SEQ ID NO: 141269 - protein, 10 aa, synthetic construct
DLNRGDRTNL

SEQ ID NO: 141270 - protein, 10 aa, synthetic construct
DLQRGDRTNL

SEQ ID NO: 141271 - protein, 10 aa, synthetic construct
DLDRGDRTNL

SEQ ID NO: 141272 - protein, 10 aa, synthetic construct
DLERGDRTNL

SEQ ID NO: 141273 - protein, 10 aa, synthetic construct
DIGRGDRTNL

SEQ ID NO: 141274 - protein, 10 aa, synthetic construct
DIARGDRTNL

SEQ ID NO: 141275 - protein, 10 aa, synthetic construct
DIVRGDRTNL

SEQ ID NO: 141276 - protein, 10 aa, synthetic construct
DIPRGDRTNL

SEQ ID NO: 141277 - protein, 10 aa, synthetic construct
DILRGDRTNL

SEQ ID NO: 141278 - protein, 10 aa, synthetic construct
DIIRGDRTNL

SEQ ID NO: 141279 - protein, 10 aa, synthetic construct
DIMRGDRTNL

SEQ ID NO: 141280 - protein, 10 aa, synthetic construct
DIWRGDRTNL

SEQ ID NO: 141281 - protein, 10 aa, synthetic construct
DIFRGDRTNL

SEQ ID NO: 141282 - protein, 10 aa, synthetic construct
DIKRGDRTNL

SEQ ID NO: 141283 - protein, 10 aa, synthetic construct
DIRRGDRTNL

SEQ ID NO: 141284 - protein, 10 aa, synthetic construct
DIHRGDRTNL

SEQ ID NO: 141285 - protein, 10 aa, synthetic construct
DISRGDRTNL

SEQ ID NO: 141286 - protein, 10 aa, synthetic construct
DITRGDRTNL

SEQ ID NO: 141287 - protein, 10 aa, synthetic construct
DIYRGDRTNL

SEQ ID NO: 141288 - protein, 10 aa, synthetic construct
DINRGDRTNL

SEQ ID NO: 141289 - protein, 10 aa, synthetic construct
DIQRGDRTNL

SEQ ID NO: 141290 - protein, 10 aa, synthetic construct
DIDRGDRTNL

SEQ ID NO: 141291 - protein, 10 aa, synthetic construct
DIERGDRTNL

SEQ ID NO: 141292 - protein, 10 aa, synthetic construct
DMGRGDRTNL

SEQ ID NO: 141293 - protein, 10 aa, synthetic construct
DMARGDRTNL

SEQ ID NO: 141294 - protein, 10 aa, synthetic construct
DMVRGDRTNL

SEQ ID NO: 141295 - protein, 10 aa, synthetic construct
DMPRGDRTNL

SEQ ID NO: 141296 - protein, 10 aa, synthetic construct
DMLRGDRTNL

SEQ ID NO: 141297 - protein, 10 aa, synthetic construct
DMIRGDRTNL

SEQ ID NO: 141298 - protein, 10 aa, synthetic construct
DMMRGDRTNL

SEQ ID NO: 141299 - protein, 10 aa, synthetic construct
DMWRGDRTNL

SEQ ID NO: 141300 - protein, 10 aa, synthetic construct
DMFRGDRTNL

SEQ ID NO: 141301 - protein, 10 aa, synthetic construct
DMKRGDRTNL

SEQ ID NO: 141302 - protein, 10 aa, synthetic construct
DMRRGDRTNL

SEQ ID NO: 141303 - protein, 10 aa, synthetic construct
DMHRGDRTNL

SEQ ID NO: 141304 - protein, 10 aa, synthetic construct
DMSRGDRTNL

SEQ ID NO: 141305 - protein, 10 aa, synthetic construct
DMTRGDRTNL

SEQ ID NO: 141306 - protein, 10 aa, synthetic construct
DMYRGDRTNL

SEQ ID NO: 141307 - protein, 10 aa, synthetic construct
DMNRGDRTNL

SEQ ID NO: 141308 - protein, 10 aa, synthetic construct
DMQRGDRTNL

SEQ ID NO: 141309 - protein, 10 aa, synthetic construct
DMDRGDRTNL

SEQ ID NO: 141310 - protein, 10 aa, synthetic construct
DMERGDRTNL

SEQ ID NO: 141311 - protein, 10 aa, synthetic construct
DWGRGDRTNL

SEQ ID NO: 141312 - protein, 10 aa, synthetic construct
DWARGDRTNL

SEQ ID NO: 141313 - protein, 10 aa, synthetic construct
DWVRGDRTNL

SEQ ID NO: 141314 - protein, 10 aa, synthetic construct
DWPRGDRTNL

SEQ ID NO: 141315 - protein, 10 aa, synthetic construct
DWLRGDRTNL

SEQ ID NO: 141316 - protein, 10 aa, synthetic construct
DWIRGDRTNL

SEQ ID NO: 141317 - protein, 10 aa, synthetic construct
DWMRGDRTNL

SEQ ID NO: 141318 - protein, 10 aa, synthetic construct
DWWRGDRTNL

SEQ ID NO: 141319 - protein, 10 aa, synthetic construct
DWFRGDRTNL

SEQ ID NO: 141320 - protein, 10 aa, synthetic construct
DWKRGDRTNL

SEQ ID NO: 141321 - protein, 10 aa, synthetic construct
DWRRGDRTNL

SEQ ID NO: 141322 - protein, 10 aa, synthetic construct
DWHRGDRTNL

SEQ ID NO: 141323 - protein, 10 aa, synthetic construct
DWSRGDRTNL

SEQ ID NO: 141324 - protein, 10 aa, synthetic construct
DWTRGDRTNL

SEQ ID NO: 141325 - protein, 10 aa, synthetic construct
DWYRGDRTNL

SEQ ID NO: 141326 - protein, 10 aa, synthetic construct
DWNRGDRTNL

SEQ ID NO: 141327 - protein, 10 aa, synthetic construct
DWQRGDRTNL

SEQ ID NO: 141328 - protein, 10 aa, synthetic construct
DWDRGDRTNL

SEQ ID NO: 141329 - protein, 10 aa, synthetic construct
DWERGDRTNL

SEQ ID NO: 141330 - protein, 10 aa, synthetic construct
DFGRGDRTNL

SEQ ID NO: 141331 - protein, 10 aa, synthetic construct
DFARGDRTNL

SEQ ID NO: 141332 - protein, 10 aa, synthetic construct
DFVRGDRTNL

SEQ ID NO: 141333 - protein, 10 aa, synthetic construct
DFPRGDRTNL

SEQ ID NO: 141334 - protein, 10 aa, synthetic construct
DFLRGDRTNL

SEQ ID NO: 141335 - protein, 10 aa, synthetic construct
DFIRGDRTNL

SEQ ID NO: 141336 - protein, 10 aa, synthetic construct
DFMRGDRTNL

SEQ ID NO: 141337 - protein, 10 aa, synthetic construct
DFWRGDRTNL

SEQ ID NO: 141338 - protein, 10 aa, synthetic construct
DFFRGDRTNL

SEQ ID NO: 141339 - protein, 10 aa, synthetic construct
DFKRGDRTNL

SEQ ID NO: 141340 - protein, 10 aa, synthetic construct
DFRRGDRTNL

SEQ ID NO: 141341 - protein, 10 aa, synthetic construct
DFHRGDRTNL

SEQ ID NO: 141342 - protein, 10 aa, synthetic construct
DFSRGDRTNL

SEQ ID NO: 141343 - protein, 10 aa, synthetic construct
DFTRGDRTNL

SEQ ID NO: 141344 - protein, 10 aa, synthetic construct
DFYRGDRTNL

SEQ ID NO: 141345 - protein, 10 aa, synthetic construct
DFNRGDRTNL

SEQ ID NO: 141346 - protein, 10 aa, synthetic construct
DFQRGDRTNL

SEQ ID NO: 141347 - protein, 10 aa, synthetic construct
DFDRGDRTNL

SEQ ID NO: 141348 - protein, 10 aa, synthetic construct
DFERGDRTNL

SEQ ID NO: 141349 - protein, 10 aa, synthetic construct
DKGRGDRTNL

SEQ ID NO: 141350 - protein, 10 aa, synthetic construct
DKARGDRTNL

SEQ ID NO: 141351 - protein, 10 aa, synthetic construct
DKVRGDRTNL

SEQ ID NO: 141352 - protein, 10 aa, synthetic construct
DKPRGDRTNL

SEQ ID NO: 141353 - protein, 10 aa, synthetic construct
DKLRGDRTNL

SEQ ID NO: 141354 - protein, 10 aa, synthetic construct
DKIRGDRTNL

SEQ ID NO: 141355 - protein, 10 aa, synthetic construct
DKMRGDRTNL

SEQ ID NO: 141356 - protein, 10 aa, synthetic construct
DKWRGDRTNL

SEQ ID NO: 141357 - protein, 10 aa, synthetic construct
DKFRGDRTNL

SEQ ID NO: 141358 - protein, 10 aa, synthetic construct
DKKRGDRTNL

SEQ ID NO: 141359 - protein, 10 aa, synthetic construct
DKRRGDRTNL

SEQ ID NO: 141360 - protein, 10 aa, synthetic construct
DKHRGDRTNL

SEQ ID NO: 141361 - protein, 10 aa, synthetic construct
DKSRGDRTNL

SEQ ID NO: 141362 - protein, 10 aa, synthetic construct
DKTRGDRTNL

SEQ ID NO: 141363 - protein, 10 aa, synthetic construct
DKYRGDRTNL

SEQ ID NO: 141364 - protein, 10 aa, synthetic construct
DKNRGDRTNL

SEQ ID NO: 141365 - protein, 10 aa, synthetic construct
DKQRGDRTNL

SEQ ID NO: 141366 - protein, 10 aa, synthetic construct
DKDRGDRTNL

SEQ ID NO: 141367 - protein, 10 aa, synthetic construct
DKERGDRTNL

SEQ ID NO: 141368 - protein, 10 aa, synthetic construct
DRGRGDRTNL

SEQ ID NO: 141369 - protein, 10 aa, synthetic construct
DRARGDRTNL

SEQ ID NO: 141370 - protein, 10 aa, synthetic construct
DRVRGDRTNL

SEQ ID NO: 141371 - protein, 10 aa, synthetic construct
DRPRGDRTNL

SEQ ID NO: 141372 - protein, 10 aa, synthetic construct
DRLRGDRTNL

SEQ ID NO: 141373 - protein, 10 aa, synthetic construct
DRIRGDRTNL

SEQ ID NO: 141374 - protein, 10 aa, synthetic construct
DRMRGDRTNL

SEQ ID NO: 141375 - protein, 10 aa, synthetic construct
DRWRGDRTNL

SEQ ID NO: 141376 - protein, 10 aa, synthetic construct
DRFRGDRTNL

SEQ ID NO: 141377 - protein, 10 aa, synthetic construct
DRKRGDRTNL

SEQ ID NO: 141378 - protein, 10 aa, synthetic construct
DRRRGDRTNL

SEQ ID NO: 141379 - protein, 10 aa, synthetic construct
DRHRGDRTNL

SEQ ID NO: 141380 - protein, 10 aa, synthetic construct
DRSRGDRTNL

SEQ ID NO: 141381 - protein, 10 aa, synthetic construct
DRTRGDRTNL

SEQ ID NO: 141382 - protein, 10 aa, synthetic construct
DRYRGDRTNL

SEQ ID NO: 141383 - protein, 10 aa, synthetic construct
DRNRGDRTNL

SEQ ID NO: 141384 - protein, 10 aa, synthetic construct
DRQRGDRTNL

SEQ ID NO: 141385 - protein, 10 aa, synthetic construct
DRDRGDRTNL

SEQ ID NO: 141386 - protein, 10 aa, synthetic construct
DRERGDRTNL

SEQ ID NO: 141387 - protein, 10 aa, synthetic construct
DHGRGDRTNL

SEQ ID NO: 141388 - protein, 10 aa, synthetic construct
DHARGDRTNL

SEQ ID NO: 141389 - protein, 10 aa, synthetic construct
DHVRGDRTNL

SEQ ID NO: 141390 - protein, 10 aa, synthetic construct
DHPRGDRTNL

SEQ ID NO: 141391 - protein, 10 aa, synthetic construct
DHLRGDRTNL

SEQ ID NO: 141392 - protein, 10 aa, synthetic construct
DHIRGDRTNL

SEQ ID NO: 141393 - protein, 10 aa, synthetic construct
DHMRGDRTNL

SEQ ID NO: 141394 - protein, 10 aa, synthetic construct
DHWRGDRTNL

SEQ ID NO: 141395 - protein, 10 aa, synthetic construct
DHFRGDRTNL

SEQ ID NO: 141396 - protein, 10 aa, synthetic construct
DHKRGDRTNL

SEQ ID NO: 141397 - protein, 10 aa, synthetic construct
DHRRGDRTNL

SEQ ID NO: 141398 - protein, 10 aa, synthetic construct
DHHRGDRTNL

SEQ ID NO: 141399 - protein, 10 aa, synthetic construct
DHSRGDRTNL

SEQ ID NO: 141400 - protein, 10 aa, synthetic construct
DHTRGDRTNL

SEQ ID NO: 141401 - protein, 10 aa, synthetic construct
DHYRGDRTNL

SEQ ID NO: 141402 - protein, 10 aa, synthetic construct
DHNRGDRTNL

SEQ ID NO: 141403 - protein, 10 aa, synthetic construct
DHQRGDRTNL

SEQ ID NO: 141404 - protein, 10 aa, synthetic construct
DHDRGDRTNL

SEQ ID NO: 141405 - protein, 10 aa, synthetic construct
DHERGDRTNL

SEQ ID NO: 141406 - protein, 10 aa, synthetic construct
DSGRGDRTNL

SEQ ID NO: 141407 - protein, 10 aa, synthetic construct
DSARGDRTNL

SEQ ID NO: 141408 - protein, 10 aa, synthetic construct
DSVRGDRTNL

SEQ ID NO: 141409 - protein, 10 aa, synthetic construct
DSPRGDRTNL

SEQ ID NO: 141410 - protein, 10 aa, synthetic construct
DSLRGDRTNL

SEQ ID NO: 141411 - protein, 10 aa, synthetic construct
DSIRGDRTNL

SEQ ID NO: 141412 - protein, 10 aa, synthetic construct
DSMRGDRTNL

SEQ ID NO: 141413 - protein, 10 aa, synthetic construct
DSWRGDRTNL

SEQ ID NO: 141414 - protein, 10 aa, synthetic construct
DSFRGDRTNL

SEQ ID NO: 141415 - protein, 10 aa, synthetic construct
DSKRGDRTNL

SEQ ID NO: 141416 - protein, 10 aa, synthetic construct
DSRRGDRTNL

SEQ ID NO: 141417 - protein, 10 aa, synthetic construct
DSHRGDRTNL

SEQ ID NO: 141418 - protein, 10 aa, synthetic construct
DSSRGDRTNL

SEQ ID NO: 141419 - protein, 10 aa, synthetic construct
DSTRGDRTNL

SEQ ID NO: 141420 - protein, 10 aa, synthetic construct
DSYRGDRTNL

SEQ ID NO: 141421 - protein, 10 aa, synthetic construct
DSNRGDRTNL

SEQ ID NO: 141422 - protein, 10 aa, synthetic construct
DSQRGDRTNL

SEQ ID NO: 141423 - protein, 10 aa, synthetic construct
DSDRGDRTNL

SEQ ID NO: 141424 - protein, 10 aa, synthetic construct
DSERGDRTNL

SEQ ID NO: 141425 - protein, 10 aa, synthetic construct
DTGRGDRTNL

SEQ ID NO: 141426 - protein, 10 aa, synthetic construct
DTARGDRTNL

SEQ ID NO: 141427 - protein, 10 aa, synthetic construct
DTVRGDRTNL

SEQ ID NO: 141428 - protein, 10 aa, synthetic construct
DTPRGDRTNL

SEQ ID NO: 141429 - protein, 10 aa, synthetic construct
DTLRGDRTNL

SEQ ID NO: 141430 - protein, 10 aa, synthetic construct
DTIRGDRTNL

SEQ ID NO: 141431 - protein, 10 aa, synthetic construct
DTMRGDRTNL

SEQ ID NO: 141432 - protein, 10 aa, synthetic construct
DTWRGDRTNL

SEQ ID NO: 141433 - protein, 10 aa, synthetic construct
DTFRGDRTNL

SEQ ID NO: 141434 - protein, 10 aa, synthetic construct
DTKRGDRTNL

SEQ ID NO: 141435 - protein, 10 aa, synthetic construct
DTRRGDRTNL

SEQ ID NO: 141436 - protein, 10 aa, synthetic construct
DTHRGDRTNL

SEQ ID NO: 141437 - protein, 10 aa, synthetic construct
DTSRGDRTNL

SEQ ID NO: 141438 - protein, 10 aa, synthetic construct
DTTRGDRTNL

SEQ ID NO: 141439 - protein, 10 aa, synthetic construct
DTYRGDRTNL

SEQ ID NO: 141440 - protein, 10 aa, synthetic construct
DTNRGDRTNL

SEQ ID NO: 141441 - protein, 10 aa, synthetic construct
DTQRGDRTNL

SEQ ID NO: 141442 - protein, 10 aa, synthetic construct
DTDRGDRTNL

SEQ ID NO: 141443 - protein, 10 aa, synthetic construct
DTERGDRTNL

SEQ ID NO: 141444 - protein, 10 aa, synthetic construct
DYGRGDRTNL

SEQ ID NO: 141445 - protein, 10 aa, synthetic construct
DYARGDRTNL

SEQ ID NO: 141446 - protein, 10 aa, synthetic construct
DYVRGDRTNL

SEQ ID NO: 141447 - protein, 10 aa, synthetic construct
DYPRGDRTNL

SEQ ID NO: 141448 - protein, 10 aa, synthetic construct
DYLRGDRTNL

SEQ ID NO: 141449 - protein, 10 aa, synthetic construct
DYIRGDRTNL

SEQ ID NO: 141450 - protein, 10 aa, synthetic construct
DYMRGDRTNL

SEQ ID NO: 141451 - protein, 10 aa, synthetic construct
DYWRGDRTNL

SEQ ID NO: 141452 - protein, 10 aa, synthetic construct
DYFRGDRTNL

SEQ ID NO: 141453 - protein, 10 aa, synthetic construct
DYKRGDRTNL

SEQ ID NO: 141454 - protein, 10 aa, synthetic construct
DYRRGDRTNL

SEQ ID NO: 141455 - protein, 10 aa, synthetic construct
DYHRGDRTNL

SEQ ID NO: 141456 - protein, 10 aa, synthetic construct
DYSRGDRTNL

SEQ ID NO: 141457 - protein, 10 aa, synthetic construct
DYTRGDRTNL

SEQ ID NO: 141458 - protein, 10 aa, synthetic construct
DYYRGDRTNL

SEQ ID NO: 141459 - protein, 10 aa, synthetic construct
DYNRGDRTNL

SEQ ID NO: 141460 - protein, 10 aa, synthetic construct
DYQRGDRTNL

SEQ ID NO: 141461 - protein, 10 aa, synthetic construct
DYDRGDRTNL

SEQ ID NO: 141462 - protein, 10 aa, synthetic construct
DYERGDRTNL

SEQ ID NO: 141463 - protein, 10 aa, synthetic construct
DNGRGDRTNL

SEQ ID NO: 141464 - protein, 10 aa, synthetic construct
DNARGDRTNL

SEQ ID NO: 141465 - protein, 10 aa, synthetic construct
DNVRGDRTNL

SEQ ID NO: 141466 - protein, 10 aa, synthetic construct
DNPRGDRTNL

SEQ ID NO: 141467 - protein, 10 aa, synthetic construct
DNLRGDRTNL

SEQ ID NO: 141468 - protein, 10 aa, synthetic construct
DNIRGDRTNL

SEQ ID NO: 141469 - protein, 10 aa, synthetic construct
DNMRGDRTNL

SEQ ID NO: 141470 - protein, 10 aa, synthetic construct
DNWRGDRTNL

SEQ ID NO: 141471 - protein, 10 aa, synthetic construct
DNFRGDRTNL

SEQ ID NO: 141472 - protein, 10 aa, synthetic construct
DNKRGDRTNL

SEQ ID NO: 141473 - protein, 10 aa, synthetic construct
DNRRGDRTNL

SEQ ID NO: 141474 - protein, 10 aa, synthetic construct
DNHRGDRTNL

SEQ ID NO: 141475 - protein, 10 aa, synthetic construct
DNSRGDRTNL

SEQ ID NO: 141476 - protein, 10 aa, synthetic construct
DNTRGDRTNL

SEQ ID NO: 141477 - protein, 10 aa, synthetic construct
DNYRGDRTNL

SEQ ID NO: 141478 - protein, 10 aa, synthetic construct
DNNRGDRTNL

SEQ ID NO: 141479 - protein, 10 aa, synthetic construct
DNQRGDRTNL

SEQ ID NO: 141480 - protein, 10 aa, synthetic construct
DNDRGDRTNL

SEQ ID NO: 141481 - protein, 10 aa, synthetic construct
DNERGDRTNL

SEQ ID NO: 141482 - protein, 10 aa, synthetic construct
DQGRGDRTNL

SEQ ID NO: 141483 - protein, 10 aa, synthetic construct
DQARGDRTNL

SEQ ID NO: 141484 - protein, 10 aa, synthetic construct
DQVRGDRTNL

SEQ ID NO: 141485 - protein, 10 aa, synthetic construct
DQPRGDRTNL

SEQ ID NO: 141486 - protein, 10 aa, synthetic construct
DQLRGDRTNL

SEQ ID NO: 141487 - protein, 10 aa, synthetic construct
DQIRGDRTNL

SEQ ID NO: 141488 - protein, 10 aa, synthetic construct
DQMRGDRTNL

SEQ ID NO: 141489 - protein, 10 aa, synthetic construct
DQWRGDRTNL

SEQ ID NO: 141490 - protein, 10 aa, synthetic construct
DQFRGDRTNL

SEQ ID NO: 141491 - protein, 10 aa, synthetic construct
DQKRGDRTNL

SEQ ID NO: 141492 - protein, 10 aa, synthetic construct
DQRRGDRTNL

SEQ ID NO: 141493 - protein, 10 aa, synthetic construct
DQHRGDRTNL

SEQ ID NO: 141494 - protein, 10 aa, synthetic construct
DQSRGDRTNL

SEQ ID NO: 141495 - protein, 10 aa, synthetic construct
DQTRGDRTNL

SEQ ID NO: 141496 - protein, 10 aa, synthetic construct
DQYRGDRTNL

SEQ ID NO: 141497 - protein, 10 aa, synthetic construct
DQNRGDRTNL

SEQ ID NO: 141498 - protein, 10 aa, synthetic construct
DQQRGDRTNL

SEQ ID NO: 141499 - protein, 10 aa, synthetic construct
DQDRGDRTNL

SEQ ID NO: 141500 - protein, 10 aa, synthetic construct
DQERGDRTNL

SEQ ID NO: 141501 - protein, 10 aa, synthetic construct
DDGRGDRTNL

SEQ ID NO: 141502 - protein, 10 aa, synthetic construct
DDARGDRTNL

SEQ ID NO: 141503 - protein, 10 aa, synthetic construct
DDVRGDRTNL

SEQ ID NO: 141504 - protein, 10 aa, synthetic construct
DDPRGDRTNL

SEQ ID NO: 141505 - protein, 10 aa, synthetic construct
DDLRGDRTNL

SEQ ID NO: 141506 - protein, 10 aa, synthetic construct
DDIRGDRTNL

SEQ ID NO: 141507 - protein, 10 aa, synthetic construct
DDMRGDRTNL

SEQ ID NO: 141508 - protein, 10 aa, synthetic construct
DDWRGDRTNL

SEQ ID NO: 141509 - protein, 10 aa, synthetic construct
DDFRGDRTNL

SEQ ID NO: 141510 - protein, 10 aa, synthetic construct
DDKRGDRTNL

SEQ ID NO: 141511 - protein, 10 aa, synthetic construct
DDRRGDRTNL

SEQ ID NO: 141512 - protein, 10 aa, synthetic construct
DDHRGDRTNL

SEQ ID NO: 141513 - protein, 10 aa, synthetic construct
DDSRGDRTNL

SEQ ID NO: 141514 - protein, 10 aa, synthetic construct
DDTRGDRTNL

SEQ ID NO: 141515 - protein, 10 aa, synthetic construct
DDYRGDRTNL

SEQ ID NO: 141516 - protein, 10 aa, synthetic construct
DDNRGDRTNL

SEQ ID NO: 141517 - protein, 10 aa, synthetic construct
DDQRGDRTNL

SEQ ID NO: 141518 - protein, 10 aa, synthetic construct
DDDRGDRTNL

SEQ ID NO: 141519 - protein, 10 aa, synthetic construct
DDERGDRTNL

SEQ ID NO: 141520 - protein, 10 aa, synthetic construct
DEGRGDRTNL

SEQ ID NO: 141521 - protein, 10 aa, synthetic construct
DEARGDRTNL

SEQ ID NO: 141522 - protein, 10 aa, synthetic construct
DEVRGDRTNL

SEQ ID NO: 141523 - protein, 10 aa, synthetic construct
DEPRGDRTNL

SEQ ID NO: 141524 - protein, 10 aa, synthetic construct
DELRGDRTNL

SEQ ID NO: 141525 - protein, 10 aa, synthetic construct
DEIRGDRTNL

SEQ ID NO: 141526 - protein, 10 aa, synthetic construct
DEMRGDRTNL

SEQ ID NO: 141527 - protein, 10 aa, synthetic construct
DEWRGDRTNL

SEQ ID NO: 141528 - protein, 10 aa, synthetic construct
DEFRGDRTNL

SEQ ID NO: 141529 - protein, 10 aa, synthetic construct
DEKRGDRTNL

SEQ ID NO: 141530 - protein, 10 aa, synthetic construct
DERRGDRTNL

SEQ ID NO: 141531 - protein, 10 aa, synthetic construct
DEHRGDRTNL

SEQ ID NO: 141532 - protein, 10 aa, synthetic construct
DESRGDRTNL

SEQ ID NO: 141533 - protein, 10 aa, synthetic construct
DETRGDRTNL

SEQ ID NO: 141534 - protein, 10 aa, synthetic construct
DEYRGDRTNL

SEQ ID NO: 141535 - protein, 10 aa, synthetic construct
DENRGDRTNL

SEQ ID NO: 141536 - protein, 10 aa, synthetic construct
DEQRGDRTNL

SEQ ID NO: 141537 - protein, 10 aa, synthetic construct
DEDRGDRTNL

SEQ ID NO: 141538 - protein, 10 aa, synthetic construct
DEERGDRTNL

SEQ ID NO: 141539 - protein, 10 aa, synthetic construct
QGGRGDRTNL

SEQ ID NO: 141540 - protein, 10 aa, synthetic construct
QGARGDRTNL

SEQ ID NO: 141541 - protein, 10 aa, synthetic construct
QGVRGDRTNL

SEQ ID NO: 141542 - protein, 10 aa, synthetic construct
QGPRGDRTNL

SEQ ID NO: 141543 - protein, 10 aa, synthetic construct
QGLRGDRTNL

SEQ ID NO: 141544 - protein, 10 aa, synthetic construct
QGIRGDRTNL

SEQ ID NO: 141545 - protein, 10 aa, synthetic construct
QGMRGDRTNL

SEQ ID NO: 141546 - protein, 10 aa, synthetic construct
QGWRGDRTNL

SEQ ID NO: 141547 - protein, 10 aa, synthetic construct
QGFRGDRTNL

SEQ ID NO: 141548 - protein, 10 aa, synthetic construct
QGKRGDRTNL

SEQ ID NO: 141549 - protein, 10 aa, synthetic construct
QGRRGDRTNL

SEQ ID NO: 141550 - protein, 10 aa, synthetic construct
QGHRGDRTNL

SEQ ID NO: 141551 - protein, 10 aa, synthetic construct
QGSRGDRTNL

SEQ ID NO: 141552 - protein, 10 aa, synthetic construct
QGTRGDRTNL

SEQ ID NO: 141553 - protein, 10 aa, synthetic construct
QGYRGDRTNL

SEQ ID NO: 141554 - protein, 10 aa, synthetic construct
QGNRGDRTNL

SEQ ID NO: 141555 - protein, 10 aa, synthetic construct
QGQRGDRTNL

SEQ ID NO: 141556 - protein, 10 aa, synthetic construct
QGDRGDRTNL

SEQ ID NO: 141557 - protein, 10 aa, synthetic construct
QGERGDRTNL

SEQ ID NO: 141558 - protein, 10 aa, synthetic construct
QAGRGDRTNL

SEQ ID NO: 141559 - protein, 10 aa, synthetic construct
QAARGDRTNL

SEQ ID NO: 141560 - protein, 10 aa, synthetic construct
QAVRGDRTNL

SEQ ID NO: 141561 - protein, 10 aa, synthetic construct
QAPRGDRTNL

SEQ ID NO: 141562 - protein, 10 aa, synthetic construct
QALRGDRTNL

SEQ ID NO: 141563 - protein, 10 aa, synthetic construct
QAIRGDRTNL

SEQ ID NO: 141564 - protein, 10 aa, synthetic construct
QAMRGDRTNL

SEQ ID NO: 141565 - protein, 10 aa, synthetic construct
QAWRGDRTNL

SEQ ID NO: 141566 - protein, 10 aa, synthetic construct
QAFRGDRTNL

SEQ ID NO: 141567 - protein, 10 aa, synthetic construct
QAKRGDRTNL

SEQ ID NO: 141568 - protein, 10 aa, synthetic construct
QARRGDRTNL

SEQ ID NO: 141569 - protein, 10 aa, synthetic construct
QAHRGDRTNL

SEQ ID NO: 141570 - protein, 10 aa, synthetic construct
QASRGDRTNL

SEQ ID NO: 141571 - protein, 10 aa, synthetic construct
QATRGDRTNL

SEQ ID NO: 141572 - protein, 10 aa, synthetic construct
QAYRGDRTNL

SEQ ID NO: 141573 - protein, 10 aa, synthetic construct
QANRGDRTNL

SEQ ID NO: 141574 - protein, 10 aa, synthetic construct
QAQRGDRTNL

SEQ ID NO: 141575 - protein, 10 aa, synthetic construct
QADRGDRTNL

SEQ ID NO: 141576 - protein, 10 aa, synthetic construct
QAERGDRTNL

SEQ ID NO: 141577 - protein, 10 aa, synthetic construct
QVGRGDRTNL

SEQ ID NO: 141578 - protein, 10 aa, synthetic construct
QVARGDRTNL

SEQ ID NO: 141579 - protein, 10 aa, synthetic construct
QVVRGDRTNL

SEQ ID NO: 141580 - protein, 10 aa, synthetic construct
QVPRGDRTNL

SEQ ID NO: 141581 - protein, 10 aa, synthetic construct
QVLRGDRTNL

SEQ ID NO: 141582 - protein, 10 aa, synthetic construct
QVIRGDRTNL

SEQ ID NO: 141583 - protein, 10 aa, synthetic construct
QVMRGDRTNL

SEQ ID NO: 141584 - protein, 10 aa, synthetic construct
QVWRGDRTNL

SEQ ID NO: 141585 - protein, 10 aa, synthetic construct
QVFRGDRTNL

SEQ ID NO: 141586 - protein, 10 aa, synthetic construct
QVKRGDRTNL

SEQ ID NO: 141587 - protein, 10 aa, synthetic construct
QVRRGDRTNL

SEQ ID NO: 141588 - protein, 10 aa, synthetic construct
QVHRGDRTNL

SEQ ID NO: 141589 - protein, 10 aa, synthetic construct
QVSRGDRTNL

SEQ ID NO: 141590 - protein, 10 aa, synthetic construct
QVTRGDRTNL

SEQ ID NO: 141591 - protein, 10 aa, synthetic construct
QVYRGDRTNL

SEQ ID NO: 141592 - protein, 10 aa, synthetic construct
QVNRGDRTNL

SEQ ID NO: 141593 - protein, 10 aa, synthetic construct
QVQRGDRTNL

SEQ ID NO: 141594 - protein, 10 aa, synthetic construct
QVDRGDRTNL

SEQ ID NO: 141595 - protein, 10 aa, synthetic construct
QVERGDRTNL

SEQ ID NO: 141596 - protein, 10 aa, synthetic construct
QPGRGDRTNL

SEQ ID NO: 141597 - protein, 10 aa, synthetic construct
QPARGDRTNL

SEQ ID NO: 141598 - protein, 10 aa, synthetic construct
QPVRGDRTNL

SEQ ID NO: 141599 - protein, 10 aa, synthetic construct
QPPRGDRTNL

SEQ ID NO: 141600 - protein, 10 aa, synthetic construct
QPLRGDRTNL

SEQ ID NO: 141601 - protein, 10 aa, synthetic construct
QPIRGDRTNL

SEQ ID NO: 141602 - protein, 10 aa, synthetic construct
QPMRGDRTNL

SEQ ID NO: 141603 - protein, 10 aa, synthetic construct
QPWRGDRTNL

SEQ ID NO: 141604 - protein, 10 aa, synthetic construct
QPFRGDRTNL

SEQ ID NO: 141605 - protein, 10 aa, synthetic construct
QPKRGDRTNL

SEQ ID NO: 141606 - protein, 10 aa, synthetic construct
QPRRGDRTNL

SEQ ID NO: 141607 - protein, 10 aa, synthetic construct
QPHRGDRTNL

SEQ ID NO: 141608 - protein, 10 aa, synthetic construct
QPSRGDRTNL

SEQ ID NO: 141609 - protein, 10 aa, synthetic construct
QPTRGDRTNL

SEQ ID NO: 141610 - protein, 10 aa, synthetic construct
QPYRGDRTNL

SEQ ID NO: 141611 - protein, 10 aa, synthetic construct
QPNRGDRTNL

SEQ ID NO: 141612 - protein, 10 aa, synthetic construct
QPQRGDRTNL

SEQ ID NO: 141613 - protein, 10 aa, synthetic construct
QPDRGDRTNL

SEQ ID NO: 141614 - protein, 10 aa, synthetic construct
QPERGDRTNL

SEQ ID NO: 141615 - protein, 10 aa, synthetic construct
QLGRGDRTNL

SEQ ID NO: 141616 - protein, 10 aa, synthetic construct
QLARGDRTNL

SEQ ID NO: 141617 - protein, 10 aa, synthetic construct
QLVRGDRTNL

SEQ ID NO: 141618 - protein, 10 aa, synthetic construct
QLPRGDRTNL

SEQ ID NO: 141619 - protein, 10 aa, synthetic construct
QLLRGDRTNL

SEQ ID NO: 141620 - protein, 10 aa, synthetic construct
QLIRGDRTNL

SEQ ID NO: 141621 - protein, 10 aa, synthetic construct
QLMRGDRTNL

SEQ ID NO: 141622 - protein, 10 aa, synthetic construct
QLWRGDRTNL

SEQ ID NO: 141623 - protein, 10 aa, synthetic construct
QLFRGDRTNL

SEQ ID NO: 141624 - protein, 10 aa, synthetic construct
QLKRGDRTNL

SEQ ID NO: 141625 - protein, 10 aa, synthetic construct
QLRRGDRTNL

SEQ ID NO: 141626 - protein, 10 aa, synthetic construct
QLHRGDRTNL

SEQ ID NO: 141627 - protein, 10 aa, synthetic construct
QLSRGDRTNL

SEQ ID NO: 141628 - protein, 10 aa, synthetic construct
QLTRGDRTNL

SEQ ID NO: 141629 - protein, 10 aa, synthetic construct
QLYRGDRTNL

SEQ ID NO: 141630 - protein, 10 aa, synthetic construct
QLNRGDRTNL

SEQ ID NO: 141631 - protein, 10 aa, synthetic construct
QLQRGDRTNL

SEQ ID NO: 141632 - protein, 10 aa, synthetic construct
QLDRGDRTNL

SEQ ID NO: 141633 - protein, 10 aa, synthetic construct
QLERGDRTNL

SEQ ID NO: 141634 - protein, 10 aa, synthetic construct
QIGRGDRTNL

SEQ ID NO: 141635 - protein, 10 aa, synthetic construct
QIARGDRTNL

SEQ ID NO: 141636 - protein, 10 aa, synthetic construct
QIVRGDRTNL

SEQ ID NO: 141637 - protein, 10 aa, synthetic construct
QIPRGDRTNL

SEQ ID NO: 141638 - protein, 10 aa, synthetic construct
QILRGDRTNL

SEQ ID NO: 141639 - protein, 10 aa, synthetic construct
QIIRGDRTNL

SEQ ID NO: 141640 - protein, 10 aa, synthetic construct
QIMRGDRTNL

SEQ ID NO: 141641 - protein, 10 aa, synthetic construct
QIWRGDRTNL

SEQ ID NO: 141642 - protein, 10 aa, synthetic construct
QIFRGDRTNL

SEQ ID NO: 141643 - protein, 10 aa, synthetic construct
QIKRGDRTNL

SEQ ID NO: 141644 - protein, 10 aa, synthetic construct
QIRRGDRTNL

SEQ ID NO: 141645 - protein, 10 aa, synthetic construct
QIHRGDRTNL

SEQ ID NO: 141646 - protein, 10 aa, synthetic construct
QISRGDRTNL

SEQ ID NO: 141647 - protein, 10 aa, synthetic construct
QITRGDRTNL

SEQ ID NO: 141648 - protein, 10 aa, synthetic construct
QIYRGDRTNL

SEQ ID NO: 141649 - protein, 10 aa, synthetic construct
QINRGDRTNL

SEQ ID NO: 141650 - protein, 10 aa, synthetic construct
QIQRGDRTNL

SEQ ID NO: 141651 - protein, 10 aa, synthetic construct
QIDRGDRTNL

SEQ ID NO: 141652 - protein, 10 aa, synthetic construct
QIERGDRTNL

SEQ ID NO: 141653 - protein, 10 aa, synthetic construct
QMGRGDRTNL

SEQ ID NO: 141654 - protein, 10 aa, synthetic construct
QMARGDRTNL

SEQ ID NO: 141655 - protein, 10 aa, synthetic construct
QMVRGDRTNL

SEQ ID NO: 141656 - protein, 10 aa, synthetic construct
QMPRGDRTNL

SEQ ID NO: 141657 - protein, 10 aa, synthetic construct
QMLRGDRTNL

SEQ ID NO: 141658 - protein, 10 aa, synthetic construct
QMIRGDRTNL

SEQ ID NO: 141659 - protein, 10 aa, synthetic construct
QMMRGDRTNL

SEQ ID NO: 141660 - protein, 10 aa, synthetic construct
QMWRGDRTNL

SEQ ID NO: 141661 - protein, 10 aa, synthetic construct
QMFRGDRTNL

SEQ ID NO: 141662 - protein, 10 aa, synthetic construct
QMKRGDRTNL

SEQ ID NO: 141663 - protein, 10 aa, synthetic construct
QMRRGDRTNL

SEQ ID NO: 141664 - protein, 10 aa, synthetic construct
QMHRGDRTNL

SEQ ID NO: 141665 - protein, 10 aa, synthetic construct
QMSRGDRTNL

SEQ ID NO: 141666 - protein, 10 aa, synthetic construct
QMTRGDRTNL

SEQ ID NO: 141667 - protein, 10 aa, synthetic construct
QMYRGDRTNL

SEQ ID NO: 141668 - protein, 10 aa, synthetic construct
QMNRGDRTNL

SEQ ID NO: 141669 - protein, 10 aa, synthetic construct
QMQRGDRTNL

SEQ ID NO: 141670 - protein, 10 aa, synthetic construct
QMDRGDRTNL

SEQ ID NO: 141671 - protein, 10 aa, synthetic construct
QMERGDRTNL

SEQ ID NO: 141672 - protein, 10 aa, synthetic construct
QWGRGDRTNL

SEQ ID NO: 141673 - protein, 10 aa, synthetic construct
QWARGDRTNL

SEQ ID NO: 141674 - protein, 10 aa, synthetic construct
QWVRGDRTNL

SEQ ID NO: 141675 - protein, 10 aa, synthetic construct
QWPRGDRTNL

SEQ ID NO: 141676 - protein, 10 aa, synthetic construct
QWLRGDRTNL

SEQ ID NO: 141677 - protein, 10 aa, synthetic construct
QWIRGDRTNL

SEQ ID NO: 141678 - protein, 10 aa, synthetic construct
QWMRGDRTNL

SEQ ID NO: 141679 - protein, 10 aa, synthetic construct
QWWRGDRTNL

SEQ ID NO: 141680 - protein, 10 aa, synthetic construct
QWFRGDRTNL

SEQ ID NO: 141681 - protein, 10 aa, synthetic construct
QWKRGDRTNL

SEQ ID NO: 141682 - protein, 10 aa, synthetic construct
QWRRGDRTNL

SEQ ID NO: 141683 - protein, 10 aa, synthetic construct
QWHRGDRTNL

SEQ ID NO: 141684 - protein, 10 aa, synthetic construct
QWSRGDRTNL

SEQ ID NO: 141685 - protein, 10 aa, synthetic construct
QWTRGDRTNL

SEQ ID NO: 141686 - protein, 10 aa, synthetic construct
QWYRGDRTNL

SEQ ID NO: 141687 - protein, 10 aa, synthetic construct
QWNRGDRTNL

SEQ ID NO: 141688 - protein, 10 aa, synthetic construct
QWQRGDRTNL

SEQ ID NO: 141689 - protein, 10 aa, synthetic construct
QWDRGDRTNL

SEQ ID NO: 141690 - protein, 10 aa, synthetic construct
QWERGDRTNL

SEQ ID NO: 141691 - protein, 10 aa, synthetic construct
QFGRGDRTNL

SEQ ID NO: 141692 - protein, 10 aa, synthetic construct
QFARGDRTNL

SEQ ID NO: 141693 - protein, 10 aa, synthetic construct
QFVRGDRTNL

SEQ ID NO: 141694 - protein, 10 aa, synthetic construct
QFPRGDRTNL

SEQ ID NO: 141695 - protein, 10 aa, synthetic construct
QFLRGDRTNL

SEQ ID NO: 141696 - protein, 10 aa, synthetic construct
QFIRGDRTNL

SEQ ID NO: 141697 - protein, 10 aa, synthetic construct
QFMRGDRTNL

SEQ ID NO: 141698 - protein, 10 aa, synthetic construct
QFWRGDRTNL

SEQ ID NO: 141699 - protein, 10 aa, synthetic construct
QFFRGDRTNL

SEQ ID NO: 141700 - protein, 10 aa, synthetic construct
QFKRGDRTNL

SEQ ID NO: 141701 - protein, 10 aa, synthetic construct
QFRRGDRTNL

SEQ ID NO: 141702 - protein, 10 aa, synthetic construct
QFHRGDRTNL

SEQ ID NO: 141703 - protein, 10 aa, synthetic construct
QFSRGDRTNL

SEQ ID NO: 141704 - protein, 10 aa, synthetic construct
QFTRGDRTNL

SEQ ID NO: 141705 - protein, 10 aa, synthetic construct
QFYRGDRTNL

SEQ ID NO: 141706 - protein, 10 aa, synthetic construct
QFNRGDRTNL

SEQ ID NO: 141707 - protein, 10 aa, synthetic construct
QFQRGDRTNL

SEQ ID NO: 141708 - protein, 10 aa, synthetic construct
QFDRGDRTNL

SEQ ID NO: 141709 - protein, 10 aa, synthetic construct
QFERGDRTNL

SEQ ID NO: 141710 - protein, 10 aa, synthetic construct
QKGRGDRTNL

SEQ ID NO: 141711 - protein, 10 aa, synthetic construct
QKARGDRTNL

SEQ ID NO: 141712 - protein, 10 aa, synthetic construct
QKVRGDRTNL

SEQ ID NO: 141713 - protein, 10 aa, synthetic construct
QKPRGDRTNL

SEQ ID NO: 141714 - protein, 10 aa, synthetic construct
QKLRGDRTNL

SEQ ID NO: 141715 - protein, 10 aa, synthetic construct
QKIRGDRTNL

SEQ ID NO: 141716 - protein, 10 aa, synthetic construct
QKMRGDRTNL

SEQ ID NO: 141717 - protein, 10 aa, synthetic construct
QKWRGDRTNL

SEQ ID NO: 141718 - protein, 10 aa, synthetic construct
QKFRGDRTNL

SEQ ID NO: 141719 - protein, 10 aa, synthetic construct
QKKRGDRTNL

SEQ ID NO: 141720 - protein, 10 aa, synthetic construct
QKRRGDRTNL

SEQ ID NO: 141721 - protein, 10 aa, synthetic construct
QKHRGDRTNL

SEQ ID NO: 141722 - protein, 10 aa, synthetic construct
QKSRGDRTNL

SEQ ID NO: 141723 - protein, 10 aa, synthetic construct
QKTRGDRTNL

SEQ ID NO: 141724 - protein, 10 aa, synthetic construct
QKYRGDRTNL

SEQ ID NO: 141725 - protein, 10 aa, synthetic construct
QKNRGDRTNL

SEQ ID NO: 141726 - protein, 10 aa, synthetic construct
QKQRGDRTNL

SEQ ID NO: 141727 - protein, 10 aa, synthetic construct
QKDRGDRTNL

SEQ ID NO: 141728 - protein, 10 aa, synthetic construct
QKERGDRTNL

SEQ ID NO: 141729 - protein, 10 aa, synthetic construct
QRGRGDRTNL

SEQ ID NO: 141730 - protein, 10 aa, synthetic construct
QRARGDRTNL

SEQ ID NO: 141731 - protein, 10 aa, synthetic construct
QRVRGDRTNL

SEQ ID NO: 141732 - protein, 10 aa, synthetic construct
QRPRGDRTNL

SEQ ID NO: 141733 - protein, 10 aa, synthetic construct
QRLRGDRTNL

SEQ ID NO: 141734 - protein, 10 aa, synthetic construct
QRIRGDRTNL

SEQ ID NO: 141735 - protein, 10 aa, synthetic construct
QRMRGDRTNL

SEQ ID NO: 141736 - protein, 10 aa, synthetic construct
QRWRGDRTNL

SEQ ID NO: 141737 - protein, 10 aa, synthetic construct
QRFRGDRTNL

SEQ ID NO: 141738 - protein, 10 aa, synthetic construct
QRKRGDRTNL

SEQ ID NO: 141739 - protein, 10 aa, synthetic construct
QRRRGDRTNL

SEQ ID NO: 141740 - protein, 10 aa, synthetic construct
QRHRGDRTNL

SEQ ID NO: 141741 - protein, 10 aa, synthetic construct
QRSRGDRTNL

SEQ ID NO: 141742 - protein, 10 aa, synthetic construct
QRTRGDRTNL

SEQ ID NO: 141743 - protein, 10 aa, synthetic construct
QRYRGDRTNL

SEQ ID NO: 141744 - protein, 10 aa, synthetic construct
QRNRGDRTNL

SEQ ID NO: 141745 - protein, 10 aa, synthetic construct
QRQRGDRTNL

SEQ ID NO: 141746 - protein, 10 aa, synthetic construct
QRDRGDRTNL

SEQ ID NO: 141747 - protein, 10 aa, synthetic construct
QRERGDRTNL

SEQ ID NO: 141748 - protein, 10 aa, synthetic construct
QHGRGDRTNL

SEQ ID NO: 141749 - protein, 10 aa, synthetic construct
QHARGDRTNL

SEQ ID NO: 141750 - protein, 10 aa, synthetic construct
QHVRGDRTNL

SEQ ID NO: 141751 - protein, 10 aa, synthetic construct
QHPRGDRTNL

SEQ ID NO: 141752 - protein, 10 aa, synthetic construct
QHLRGDRTNL

SEQ ID NO: 141753 - protein, 10 aa, synthetic construct
QHIRGDRTNL

SEQ ID NO: 141754 - protein, 10 aa, synthetic construct
QHMRGDRTNL

SEQ ID NO: 141755 - protein, 10 aa, synthetic construct
QHWRGDRTNL

SEQ ID NO: 141756 - protein, 10 aa, synthetic construct
QHFRGDRTNL

SEQ ID NO: 141757 - protein, 10 aa, synthetic construct
QHKRGDRTNL

SEQ ID NO: 141758 - protein, 10 aa, synthetic construct
QHRRGDRTNL

SEQ ID NO: 141759 - protein, 10 aa, synthetic construct
QHHRGDRTNL

SEQ ID NO: 141760 - protein, 10 aa, synthetic construct
QHSRGDRTNL

SEQ ID NO: 141761 - protein, 10 aa, synthetic construct
QHTRGDRTNL

SEQ ID NO: 141762 - protein, 10 aa, synthetic construct
QHYRGDRTNL

SEQ ID NO: 141763 - protein, 10 aa, synthetic construct
QHNRGDRTNL

SEQ ID NO: 141764 - protein, 10 aa, synthetic construct
QHQRGDRTNL

SEQ ID NO: 141765 - protein, 10 aa, synthetic construct
QHDRGDRTNL

SEQ ID NO: 141766 - protein, 10 aa, synthetic construct
QHERGDRTNL

SEQ ID NO: 141767 - protein, 10 aa, synthetic construct
QSGRGDRTNL

SEQ ID NO: 141768 - protein, 10 aa, synthetic construct
QSARGDRTNL

SEQ ID NO: 141769 - protein, 10 aa, synthetic construct
QSVRGDRTNL

SEQ ID NO: 141770 - protein, 10 aa, synthetic construct
QSPRGDRTNL

SEQ ID NO: 141771 - protein, 10 aa, synthetic construct
QSLRGDRTNL

SEQ ID NO: 141772 - protein, 10 aa, synthetic construct
QSIRGDRTNL

SEQ ID NO: 141773 - protein, 10 aa, synthetic construct
QSMRGDRTNL

SEQ ID NO: 141774 - protein, 10 aa, synthetic construct
QSWRGDRTNL

SEQ ID NO: 141775 - protein, 10 aa, synthetic construct
QSFRGDRTNL

SEQ ID NO: 141776 - protein, 10 aa, synthetic construct
QSKRGDRTNL

SEQ ID NO: 141777 - protein, 10 aa, synthetic construct
QSRRGDRTNL

SEQ ID NO: 141778 - protein, 10 aa, synthetic construct
QSHRGDRTNL

SEQ ID NO: 141779 - protein, 10 aa, synthetic construct
QSSRGDRTNL

SEQ ID NO: 141780 - protein, 10 aa, synthetic construct
QSTRGDRTNL

SEQ ID NO: 141781 - protein, 10 aa, synthetic construct
QSYRGDRTNL

SEQ ID NO: 141782 - protein, 10 aa, synthetic construct
QSNRGDRTNL

SEQ ID NO: 141783 - protein, 10 aa, synthetic construct
QSQRGDRTNL

SEQ ID NO: 141784 - protein, 10 aa, synthetic construct
QSDRGDRTNL

SEQ ID NO: 141785 - protein, 10 aa, synthetic construct
QSERGDRTNL

SEQ ID NO: 141786 - protein, 10 aa, synthetic construct
QTGRGDRTNL

SEQ ID NO: 141787 - protein, 10 aa, synthetic construct
QTARGDRTNL

SEQ ID NO: 141788 - protein, 10 aa, synthetic construct
QTVRGDRTNL

SEQ ID NO: 141789 - protein, 10 aa, synthetic construct
QTPRGDRTNL

SEQ ID NO: 141790 - protein, 10 aa, synthetic construct
QTLRGDRTNL

SEQ ID NO: 141791 - protein, 10 aa, synthetic construct
QTIRGDRTNL

SEQ ID NO: 141792 - protein, 10 aa, synthetic construct
QTMRGDRTNL

SEQ ID NO: 141793 - protein, 10 aa, synthetic construct
QTWRGDRTNL

SEQ ID NO: 141794 - protein, 10 aa, synthetic construct
QTFRGDRTNL

SEQ ID NO: 141795 - protein, 10 aa, synthetic construct
QTKRGDRTNL

SEQ ID NO: 141796 - protein, 10 aa, synthetic construct
QTRRGDRTNL

SEQ ID NO: 141797 - protein, 10 aa, synthetic construct
QTHRGDRTNL

SEQ ID NO: 141798 - protein, 10 aa, synthetic construct
QTSRGDRTNL

SEQ ID NO: 141799 - protein, 10 aa, synthetic construct
QTTRGDRTNL

SEQ ID NO: 141800 - protein, 10 aa, synthetic construct
QTYRGDRTNL

SEQ ID NO: 141801 - protein, 10 aa, synthetic construct
QTNRGDRTNL

SEQ ID NO: 141802 - protein, 10 aa, synthetic construct
QTQRGDRTNL

SEQ ID NO: 141803 - protein, 10 aa, synthetic construct
QTDRGDRTNL

SEQ ID NO: 141804 - protein, 10 aa, synthetic construct
QTERGDRTNL

SEQ ID NO: 141805 - protein, 10 aa, synthetic construct
QYGRGDRTNL

SEQ ID NO: 141806 - protein, 10 aa, synthetic construct
QYARGDRTNL

SEQ ID NO: 141807 - protein, 10 aa, synthetic construct
QYVRGDRTNL

SEQ ID NO: 141808 - protein, 10 aa, synthetic construct
QYPRGDRTNL

SEQ ID NO: 141809 - protein, 10 aa, synthetic construct
QYLRGDRTNL

SEQ ID NO: 141810 - protein, 10 aa, synthetic construct
QYIRGDRTNL

SEQ ID NO: 141811 - protein, 10 aa, synthetic construct
QYMRGDRTNL

SEQ ID NO: 141812 - protein, 10 aa, synthetic construct
QYWRGDRTNL

SEQ ID NO: 141813 - protein, 10 aa, synthetic construct
QYFRGDRTNL

SEQ ID NO: 141814 - protein, 10 aa, synthetic construct
QYKRGDRTNL

SEQ ID NO: 141815 - protein, 10 aa, synthetic construct
QYRRGDRTNL

SEQ ID NO: 141816 - protein, 10 aa, synthetic construct
QYHRGDRTNL

SEQ ID NO: 141817 - protein, 10 aa, synthetic construct
QYSRGDRTNL

SEQ ID NO: 141818 - protein, 10 aa, synthetic construct
QYTRGDRTNL

SEQ ID NO: 141819 - protein, 10 aa, synthetic construct
QYYRGDRTNL

SEQ ID NO: 141820 - protein, 10 aa, synthetic construct
QYNRGDRTNL

SEQ ID NO: 141821 - protein, 10 aa, synthetic construct
QYQRGDRTNL

SEQ ID NO: 141822 - protein, 10 aa, synthetic construct
QYDRGDRTNL

SEQ ID NO: 141823 - protein, 10 aa, synthetic construct
QYERGDRTNL

SEQ ID NO: 141824 - protein, 10 aa, synthetic construct
QNGRGDRTNL

SEQ ID NO: 141825 - protein, 10 aa, synthetic construct
QNARGDRTNL

SEQ ID NO: 141826 - protein, 10 aa, synthetic construct
QNVRGDRTNL

SEQ ID NO: 141827 - protein, 10 aa, synthetic construct
QNPRGDRTNL

SEQ ID NO: 141828 - protein, 10 aa, synthetic construct
QNLRGDRTNL

SEQ ID NO: 141829 - protein, 10 aa, synthetic construct
QNIRGDRTNL

SEQ ID NO: 141830 - protein, 10 aa, synthetic construct
QNMRGDRTNL

SEQ ID NO: 141831 - protein, 10 aa, synthetic construct
QNWRGDRTNL

SEQ ID NO: 141832 - protein, 10 aa, synthetic construct
QNFRGDRTNL

SEQ ID NO: 141833 - protein, 10 aa, synthetic construct
QNKRGDRTNL

SEQ ID NO: 141834 - protein, 10 aa, synthetic construct
QNRRGDRTNL

SEQ ID NO: 141835 - protein, 10 aa, synthetic construct
QNHRGDRTNL

SEQ ID NO: 141836 - protein, 10 aa, synthetic construct
QNSRGDRTNL

SEQ ID NO: 141837 - protein, 10 aa, synthetic construct
QNTRGDRTNL

SEQ ID NO: 141838 - protein, 10 aa, synthetic construct
QNYRGDRTNL

SEQ ID NO: 141839 - protein, 10 aa, synthetic construct
QNNRGDRTNL

SEQ ID NO: 141840 - protein, 10 aa, synthetic construct
QNQRGDRTNL

SEQ ID NO: 141841 - protein, 10 aa, synthetic construct
QNDRGDRTNL

SEQ ID NO: 141842 - protein, 10 aa, synthetic construct
QNERGDRTNL

SEQ ID NO: 141843 - protein, 10 aa, synthetic construct
QQGRGDRTNL

SEQ ID NO: 141844 - protein, 10 aa, synthetic construct
QQARGDRTNL

SEQ ID NO: 141845 - protein, 10 aa, synthetic construct
QQVRGDRTNL

SEQ ID NO: 141846 - protein, 10 aa, synthetic construct
QQPRGDRTNL

SEQ ID NO: 141847 - protein, 10 aa, synthetic construct
QQLRGDRTNL

SEQ ID NO: 141848 - protein, 10 aa, synthetic construct
QQIRGDRTNL

SEQ ID NO: 141849 - protein, 10 aa, synthetic construct
QQMRGDRTNL

SEQ ID NO: 141850 - protein, 10 aa, synthetic construct
QQWRGDRTNL

SEQ ID NO: 141851 - protein, 10 aa, synthetic construct
QQFRGDRTNL

SEQ ID NO: 141852 - protein, 10 aa, synthetic construct
QQKRGDRTNL

SEQ ID NO: 141853 - protein, 10 aa, synthetic construct
QQRRGDRTNL

SEQ ID NO: 141854 - protein, 10 aa, synthetic construct
QQHRGDRTNL

SEQ ID NO: 141855 - protein, 10 aa, synthetic construct
QQSRGDRTNL

SEQ ID NO: 141856 - protein, 10 aa, synthetic construct
QQTRGDRTNL

SEQ ID NO: 141857 - protein, 10 aa, synthetic construct
QQYRGDRTNL

SEQ ID NO: 141858 - protein, 10 aa, synthetic construct
QQNRGDRTNL

SEQ ID NO: 141859 - protein, 10 aa, synthetic construct
QQQRGDRTNL

SEQ ID NO: 141860 - protein, 10 aa, synthetic construct
QQDRGDRTNL

SEQ ID NO: 141861 - protein, 10 aa, synthetic construct
QQERGDRTNL

SEQ ID NO: 141862 - protein, 10 aa, synthetic construct
QDGRGDRTNL

SEQ ID NO: 141863 - protein, 10 aa, synthetic construct
QDARGDRTNL

SEQ ID NO: 141864 - protein, 10 aa, synthetic construct
QDVRGDRTNL

SEQ ID NO: 141865 - protein, 10 aa, synthetic construct
QDPRGDRTNL

SEQ ID NO: 141866 - protein, 10 aa, synthetic construct
QDLRGDRTNL

SEQ ID NO: 141867 - protein, 10 aa, synthetic construct
QDIRGDRTNL

SEQ ID NO: 141868 - protein, 10 aa, synthetic construct
QDMRGDRTNL

SEQ ID NO: 141869 - protein, 10 aa, synthetic construct
QDWRGDRTNL

SEQ ID NO: 141870 - protein, 10 aa, synthetic construct
QDFRGDRTNL

SEQ ID NO: 141871 - protein, 10 aa, synthetic construct
QDKRGDRTNL

SEQ ID NO: 141872 - protein, 10 aa, synthetic construct
QDRRGDRTNL

SEQ ID NO: 141873 - protein, 10 aa, synthetic construct
QDHRGDRTNL

SEQ ID NO: 141874 - protein, 10 aa, synthetic construct
QDSRGDRTNL

SEQ ID NO: 141875 - protein, 10 aa, synthetic construct
QDTRGDRTNL

SEQ ID NO: 141876 - protein, 10 aa, synthetic construct
QDYRGDRTNL

SEQ ID NO: 141877 - protein, 10 aa, synthetic construct
QDNRGDRTNL

SEQ ID NO: 141878 - protein, 10 aa, synthetic construct
QDQRGDRTNL

SEQ ID NO: 141879 - protein, 10 aa, synthetic construct
QDDRGDRTNL

SEQ ID NO: 141880 - protein, 10 aa, synthetic construct
QDERGDRTNL

SEQ ID NO: 141881 - protein, 10 aa, synthetic construct
QEGRGDRTNL

SEQ ID NO: 141882 - protein, 10 aa, synthetic construct
QEARGDRTNL

SEQ ID NO: 141883 - protein, 10 aa, synthetic construct
QEVRGDRTNL

SEQ ID NO: 141884 - protein, 10 aa, synthetic construct
QEPRGDRTNL

SEQ ID NO: 141885 - protein, 10 aa, synthetic construct
QELRGDRTNL

SEQ ID NO: 141886 - protein, 10 aa, synthetic construct
QEIRGDRTNL

SEQ ID NO: 141887 - protein, 10 aa, synthetic construct
QEMRGDRTNL

SEQ ID NO: 141888 - protein, 10 aa, synthetic construct
QEWRGDRTNL

SEQ ID NO: 141889 - protein, 10 aa, synthetic construct
QEFRGDRTNL

SEQ ID NO: 141890 - protein, 10 aa, synthetic construct
QEKRGDRTNL

SEQ ID NO: 141891 - protein, 10 aa, synthetic construct
QERRGDRTNL

SEQ ID NO: 141892 - protein, 10 aa, synthetic construct
QEHRGDRTNL

SEQ ID NO: 141893 - protein, 10 aa, synthetic construct
QESRGDRTNL

SEQ ID NO: 141894 - protein, 10 aa, synthetic construct
QETRGDRTNL

SEQ ID NO: 141895 - protein, 10 aa, synthetic construct
QEYRGDRTNL

SEQ ID NO: 141896 - protein, 10 aa, synthetic construct
QENRGDRTNL

SEQ ID NO: 141897 - protein, 10 aa, synthetic construct
QEQRGDRTNL

SEQ ID NO: 141898 - protein, 10 aa, synthetic construct
QEDRGDRTNL

SEQ ID NO: 141899 - protein, 10 aa, synthetic construct
QEERGDRTNL

SEQ ID NO: 141900 - protein, 10 aa, synthetic construct
SGGRGDVRTL

SEQ ID NO: 141901 - protein, 10 aa, synthetic construct
SGARGDVRTL

SEQ ID NO: 141902 - protein, 10 aa, synthetic construct
SGVRGDVRTL

SEQ ID NO: 141903 - protein, 10 aa, synthetic construct
SGPRGDVRTL

SEQ ID NO: 141904 - protein, 10 aa, synthetic construct
SGLRGDVRTL

SEQ ID NO: 141905 - protein, 10 aa, synthetic construct
SGIRGDVRTL

SEQ ID NO: 141906 - protein, 10 aa, synthetic construct
SGMRGDVRTL

SEQ ID NO: 141907 - protein, 10 aa, synthetic construct
SGWRGDVRTL

SEQ ID NO: 141908 - protein, 10 aa, synthetic construct
SGFRGDVRTL

SEQ ID NO: 141909 - protein, 10 aa, synthetic construct
SGKRGDVRTL

SEQ ID NO: 141910 - protein, 10 aa, synthetic construct
SGRRGDVRTL

SEQ ID NO: 141911 - protein, 10 aa, synthetic construct
SGHRGDVRTL

SEQ ID NO: 141912 - protein, 10 aa, synthetic construct
SGSRGDVRTL

SEQ ID NO: 141913 - protein, 10 aa, synthetic construct
SGTRGDVRTL

SEQ ID NO: 141914 - protein, 10 aa, synthetic construct
SGYRGDVRTL

SEQ ID NO: 141915 - protein, 10 aa, synthetic construct
SGNRGDVRTL

SEQ ID NO: 141916 - protein, 10 aa, synthetic construct
SGQRGDVRTL

SEQ ID NO: 141917 - protein, 10 aa, synthetic construct
SGDRGDVRTL

SEQ ID NO: 141918 - protein, 10 aa, synthetic construct
SGERGDVRTL

SEQ ID NO: 141919 - protein, 10 aa, synthetic construct
SAGRGDVRTL

SEQ ID NO: 141920 - protein, 10 aa, synthetic construct
SAARGDVRTL

SEQ ID NO: 141921 - protein, 10 aa, synthetic construct
SAVRGDVRTL

SEQ ID NO: 141922 - protein, 10 aa, synthetic construct
SAPRGDVRTL

SEQ ID NO: 141923 - protein, 10 aa, synthetic construct
SALRGDVRTL

SEQ ID NO: 141924 - protein, 10 aa, synthetic construct
SAIRGDVRTL

SEQ ID NO: 141925 - protein, 10 aa, synthetic construct
SAMRGDVRTL

SEQ ID NO: 141926 - protein, 10 aa, synthetic construct
SAWRGDVRTL

SEQ ID NO: 141927 - protein, 10 aa, synthetic construct
SAFRGDVRTL

SEQ ID NO: 141928 - protein, 10 aa, synthetic construct
SAKRGDVRTL

SEQ ID NO: 141929 - protein, 10 aa, synthetic construct
SARRGDVRTL

SEQ ID NO: 141930 - protein, 10 aa, synthetic construct
SAHRGDVRTL

SEQ ID NO: 141931 - protein, 10 aa, synthetic construct
SASRGDVRTL

SEQ ID NO: 141932 - protein, 10 aa, synthetic construct
SATRGDVRTL

SEQ ID NO: 141933 - protein, 10 aa, synthetic construct
SAYRGDVRTL

SEQ ID NO: 141934 - protein, 10 aa, synthetic construct
SANRGDVRTL

SEQ ID NO: 141935 - protein, 10 aa, synthetic construct
SAQRGDVRTL

SEQ ID NO: 141936 - protein, 10 aa, synthetic construct
SADRGDVRTL

SEQ ID NO: 141937 - protein, 10 aa, synthetic construct
SAERGDVRTL

SEQ ID NO: 141938 - protein, 10 aa, synthetic construct
SVGRGDVRTL

SEQ ID NO: 141939 - protein, 10 aa, synthetic construct
SVARGDVRTL

SEQ ID NO: 141940 - protein, 10 aa, synthetic construct
SVVRGDVRTL

SEQ ID NO: 141941 - protein, 10 aa, synthetic construct
SVPRGDVRTL

SEQ ID NO: 141942 - protein, 10 aa, synthetic construct
SVLRGDVRTL

SEQ ID NO: 141943 - protein, 10 aa, synthetic construct
SVIRGDVRTL

SEQ ID NO: 141944 - protein, 10 aa, synthetic construct
SVMRGDVRTL

SEQ ID NO: 141945 - protein, 10 aa, synthetic construct
SVWRGDVRTL

SEQ ID NO: 141946 - protein, 10 aa, synthetic construct
SVFRGDVRTL

SEQ ID NO: 141947 - protein, 10 aa, synthetic construct
SVKRGDVRTL

SEQ ID NO: 141948 - protein, 10 aa, synthetic construct
SVRRGDVRTL

SEQ ID NO: 141949 - protein, 10 aa, synthetic construct
SVHRGDVRTL

SEQ ID NO: 141950 - protein, 10 aa, synthetic construct
SVSRGDVRTL

SEQ ID NO: 141951 - protein, 10 aa, synthetic construct
SVTRGDVRTL

SEQ ID NO: 141952 - protein, 10 aa, synthetic construct
SVYRGDVRTL

SEQ ID NO: 141953 - protein, 10 aa, synthetic construct
SVNRGDVRTL

SEQ ID NO: 141954 - protein, 10 aa, synthetic construct
SVQRGDVRTL

SEQ ID NO: 141955 - protein, 10 aa, synthetic construct
SVDRGDVRTL

SEQ ID NO: 141956 - protein, 10 aa, synthetic construct
SVERGDVRTL

SEQ ID NO: 141957 - protein, 10 aa, synthetic construct
SPGRGDVRTL

SEQ ID NO: 141958 - protein, 10 aa, synthetic construct
SPARGDVRTL

SEQ ID NO: 141959 - protein, 10 aa, synthetic construct
SPVRGDVRTL

SEQ ID NO: 141960 - protein, 10 aa, synthetic construct
SPPRGDVRTL

SEQ ID NO: 141961 - protein, 10 aa, synthetic construct
SPLRGDVRTL

SEQ ID NO: 141962 - protein, 10 aa, synthetic construct
SPIRGDVRTL

SEQ ID NO: 141963 - protein, 10 aa, synthetic construct
SPMRGDVRTL

SEQ ID NO: 141964 - protein, 10 aa, synthetic construct
SPWRGDVRTL

SEQ ID NO: 141965 - protein, 10 aa, synthetic construct
SPFRGDVRTL

SEQ ID NO: 141966 - protein, 10 aa, synthetic construct
SPKRGDVRTL

SEQ ID NO: 141967 - protein, 10 aa, synthetic construct
SPRRGDVRTL

SEQ ID NO: 141968 - protein, 10 aa, synthetic construct
SPHRGDVRTL

SEQ ID NO: 141969 - protein, 10 aa, synthetic construct
SPSRGDVRTL

SEQ ID NO: 141970 - protein, 10 aa, synthetic construct
SPTRGDVRTL

SEQ ID NO: 141971 - protein, 10 aa, synthetic construct
SPYRGDVRTL

SEQ ID NO: 141972 - protein, 10 aa, synthetic construct
SPNRGDVRTL

SEQ ID NO: 141973 - protein, 10 aa, synthetic construct
SPQRGDVRTL

SEQ ID NO: 141974 - protein, 10 aa, synthetic construct
SPDRGDVRTL

SEQ ID NO: 141975 - protein, 10 aa, synthetic construct
SPERGDVRTL

SEQ ID NO: 141976 - protein, 10 aa, synthetic construct
SLGRGDVRTL

SEQ ID NO: 141977 - protein, 10 aa, synthetic construct
SLARGDVRTL

SEQ ID NO: 141978 - protein, 10 aa, synthetic construct
SLVRGDVRTL

SEQ ID NO: 141979 - protein, 10 aa, synthetic construct
SLPRGDVRTL

SEQ ID NO: 141980 - protein, 10 aa, synthetic construct
SLLRGDVRTL

SEQ ID NO: 141981 - protein, 10 aa, synthetic construct
SLIRGDVRTL

SEQ ID NO: 141982 - protein, 10 aa, synthetic construct
SLMRGDVRTL

SEQ ID NO: 141983 - protein, 10 aa, synthetic construct
SLWRGDVRTL

SEQ ID NO: 141984 - protein, 10 aa, synthetic construct
SLFRGDVRTL

SEQ ID NO: 141985 - protein, 10 aa, synthetic construct
SLKRGDVRTL

SEQ ID NO: 141986 - protein, 10 aa, synthetic construct
SLRRGDVRTL

SEQ ID NO: 141987 - protein, 10 aa, synthetic construct
SLHRGDVRTL

SEQ ID NO: 141988 - protein, 10 aa, synthetic construct
SLSRGDVRTL

SEQ ID NO: 141989 - protein, 10 aa, synthetic construct
SLTRGDVRTL

SEQ ID NO: 141990 - protein, 10 aa, synthetic construct
SLYRGDVRTL

SEQ ID NO: 141991 - protein, 10 aa, synthetic construct
SLNRGDVRTL

SEQ ID NO: 141992 - protein, 10 aa, synthetic construct
SLQRGDVRTL

SEQ ID NO: 141993 - protein, 10 aa, synthetic construct
SLDRGDVRTL

SEQ ID NO: 141994 - protein, 10 aa, synthetic construct
SLERGDVRTL

SEQ ID NO: 141995 - protein, 10 aa, synthetic construct
SIGRGDVRTL

SEQ ID NO: 141996 - protein, 10 aa, synthetic construct
SIARGDVRTL

SEQ ID NO: 141997 - protein, 10 aa, synthetic construct
SIVRGDVRTL

SEQ ID NO: 141998 - protein, 10 aa, synthetic construct
SIPRGDVRTL

SEQ ID NO: 141999 - protein, 10 aa, synthetic construct
SILRGDVRTL

SEQ ID NO: 142000 - protein, 10 aa, synthetic construct
SIIRGDVRTL

SEQ ID NO: 142001 - protein, 10 aa, synthetic construct
SIMRGDVRTL

SEQ ID NO: 142002 - protein, 10 aa, synthetic construct
SIWRGDVRTL

SEQ ID NO: 142003 - protein, 10 aa, synthetic construct
SIFRGDVRTL

SEQ ID NO: 142004 - protein, 10 aa, synthetic construct
SIKRGDVRTL

SEQ ID NO: 142005 - protein, 10 aa, synthetic construct
SIRRGDVRTL

SEQ ID NO: 142006 - protein, 10 aa, synthetic construct
SIHRGDVRTL

SEQ ID NO: 142007 - protein, 10 aa, synthetic construct
SISRGDVRTL

SEQ ID NO: 142008 - protein, 10 aa, synthetic construct
SITRGDVRTL

SEQ ID NO: 142009 - protein, 10 aa, synthetic construct
SIYRGDVRTL

SEQ ID NO: 142010 - protein, 10 aa, synthetic construct
SINRGDVRTL

SEQ ID NO: 142011 - protein, 10 aa, synthetic construct
SIQRGDVRTL

SEQ ID NO: 142012 - protein, 10 aa, synthetic construct
SIDRGDVRTL

SEQ ID NO: 142013 - protein, 10 aa, synthetic construct
SIERGDVRTL

SEQ ID NO: 142014 - protein, 10 aa, synthetic construct
SMGRGDVRTL

SEQ ID NO: 142015 - protein, 10 aa, synthetic construct
SMARGDVRTL

SEQ ID NO: 142016 - protein, 10 aa, synthetic construct
SMVRGDVRTL

SEQ ID NO: 142017 - protein, 10 aa, synthetic construct
SMPRGDVRTL

SEQ ID NO: 142018 - protein, 10 aa, synthetic construct
SMLRGDVRTL

SEQ ID NO: 142019 - protein, 10 aa, synthetic construct
SMIRGDVRTL

SEQ ID NO: 142020 - protein, 10 aa, synthetic construct
SMMRGDVRTL

SEQ ID NO: 142021 - protein, 10 aa, synthetic construct
SMWRGDVRTL

SEQ ID NO: 142022 - protein, 10 aa, synthetic construct
SMFRGDVRTL

SEQ ID NO: 142023 - protein, 10 aa, synthetic construct
SMKRGDVRTL

SEQ ID NO: 142024 - protein, 10 aa, synthetic construct
SMRRGDVRTL

SEQ ID NO: 142025 - protein, 10 aa, synthetic construct
SMHRGDVRTL

SEQ ID NO: 142026 - protein, 10 aa, synthetic construct
SMSRGDVRTL

SEQ ID NO: 142027 - protein, 10 aa, synthetic construct
SMTRGDVRTL

SEQ ID NO: 142028 - protein, 10 aa, synthetic construct
SMYRGDVRTL

SEQ ID NO: 142029 - protein, 10 aa, synthetic construct
SMNRGDVRTL

SEQ ID NO: 142030 - protein, 10 aa, synthetic construct
SMQRGDVRTL

SEQ ID NO: 142031 - protein, 10 aa, synthetic construct
SMDRGDVRTL

SEQ ID NO: 142032 - protein, 10 aa, synthetic construct
SMERGDVRTL

SEQ ID NO: 142033 - protein, 10 aa, synthetic construct
SWGRGDVRTL

SEQ ID NO: 142034 - protein, 10 aa, synthetic construct
SWARGDVRTL

SEQ ID NO: 142035 - protein, 10 aa, synthetic construct
SWVRGDVRTL

SEQ ID NO: 142036 - protein, 10 aa, synthetic construct
SWPRGDVRTL

SEQ ID NO: 142037 - protein, 10 aa, synthetic construct
SWLRGDVRTL

SEQ ID NO: 142038 - protein, 10 aa, synthetic construct
SWIRGDVRTL

SEQ ID NO: 142039 - protein, 10 aa, synthetic construct
SWMRGDVRTL

SEQ ID NO: 142040 - protein, 10 aa, synthetic construct
SWWRGDVRTL

SEQ ID NO: 142041 - protein, 10 aa, synthetic construct
SWFRGDVRTL

SEQ ID NO: 142042 - protein, 10 aa, synthetic construct
SWKRGDVRTL

SEQ ID NO: 142043 - protein, 10 aa, synthetic construct
SWRRGDVRTL

SEQ ID NO: 142044 - protein, 10 aa, synthetic construct
SWHRGDVRTL

SEQ ID NO: 142045 - protein, 10 aa, synthetic construct
SWSRGDVRTL

SEQ ID NO: 142046 - protein, 10 aa, synthetic construct
SWTRGDVRTL

SEQ ID NO: 142047 - protein, 10 aa, synthetic construct
SWYRGDVRTL

SEQ ID NO: 142048 - protein, 10 aa, synthetic construct
SWNRGDVRTL

SEQ ID NO: 142049 - protein, 10 aa, synthetic construct
SWQRGDVRTL

SEQ ID NO: 142050 - protein, 10 aa, synthetic construct
SWDRGDVRTL

SEQ ID NO: 142051 - protein, 10 aa, synthetic construct
SWERGDVRTL

SEQ ID NO: 142052 - protein, 10 aa, synthetic construct
SFGRGDVRTL

SEQ ID NO: 142053 - protein, 10 aa, synthetic construct
SFARGDVRTL

SEQ ID NO: 142054 - protein, 10 aa, synthetic construct
SFVRGDVRTL

SEQ ID NO: 142055 - protein, 10 aa, synthetic construct
SFPRGDVRTL

SEQ ID NO: 142056 - protein, 10 aa, synthetic construct
SFLRGDVRTL

SEQ ID NO: 142057 - protein, 10 aa, synthetic construct
SFIRGDVRTL

SEQ ID NO: 142058 - protein, 10 aa, synthetic construct
SFMRGDVRTL

SEQ ID NO: 142059 - protein, 10 aa, synthetic construct
SFWRGDVRTL

SEQ ID NO: 142060 - protein, 10 aa, synthetic construct
SFFRGDVRTL

SEQ ID NO: 142061 - protein, 10 aa, synthetic construct
SFKRGDVRTL

SEQ ID NO: 142062 - protein, 10 aa, synthetic construct
SFRRGDVRTL

SEQ ID NO: 142063 - protein, 10 aa, synthetic construct
SFHRGDVRTL

SEQ ID NO: 142064 - protein, 10 aa, synthetic construct
SFSRGDVRTL

SEQ ID NO: 142065 - protein, 10 aa, synthetic construct
SFTRGDVRTL

SEQ ID NO: 142066 - protein, 10 aa, synthetic construct
SFYRGDVRTL

SEQ ID NO: 142067 - protein, 10 aa, synthetic construct
SFNRGDVRTL

SEQ ID NO: 142068 - protein, 10 aa, synthetic construct
SFQRGDVRTL

SEQ ID NO: 142069 - protein, 10 aa, synthetic construct
SFDRGDVRTL

SEQ ID NO: 142070 - protein, 10 aa, synthetic construct
SFERGDVRTL

SEQ ID NO: 142071 - protein, 10 aa, synthetic construct
SKGRGDVRTL

SEQ ID NO: 142072 - protein, 10 aa, synthetic construct
SKARGDVRTL

SEQ ID NO: 142073 - protein, 10 aa, synthetic construct
SKVRGDVRTL

SEQ ID NO: 142074 - protein, 10 aa, synthetic construct
SKPRGDVRTL

SEQ ID NO: 142075 - protein, 10 aa, synthetic construct
SKLRGDVRTL

SEQ ID NO: 142076 - protein, 10 aa, synthetic construct
SKIRGDVRTL

SEQ ID NO: 142077 - protein, 10 aa, synthetic construct
SKMRGDVRTL

SEQ ID NO: 142078 - protein, 10 aa, synthetic construct
SKWRGDVRTL

SEQ ID NO: 142079 - protein, 10 aa, synthetic construct
SKFRGDVRTL

SEQ ID NO: 142080 - protein, 10 aa, synthetic construct
SKKRGDVRTL

SEQ ID NO: 142081 - protein, 10 aa, synthetic construct
SKRRGDVRTL

SEQ ID NO: 142082 - protein, 10 aa, synthetic construct
SKHRGDVRTL

SEQ ID NO: 142083 - protein, 10 aa, synthetic construct
SKSRGDVRTL

SEQ ID NO: 142084 - protein, 10 aa, synthetic construct
SKTRGDVRTL

SEQ ID NO: 142085 - protein, 10 aa, synthetic construct
SKYRGDVRTL

SEQ ID NO: 142086 - protein, 10 aa, synthetic construct
SKNRGDVRTL

SEQ ID NO: 142087 - protein, 10 aa, synthetic construct
SKQRGDVRTL

SEQ ID NO: 142088 - protein, 10 aa, synthetic construct
SKDRGDVRTL

SEQ ID NO: 142089 - protein, 10 aa, synthetic construct
SKERGDVRTL

SEQ ID NO: 142090 - protein, 10 aa, synthetic construct
SRGRGDVRTL

SEQ ID NO: 142091 - protein, 10 aa, synthetic construct
SRARGDVRTL

SEQ ID NO: 142092 - protein, 10 aa, synthetic construct
SRVRGDVRTL

SEQ ID NO: 142093 - protein, 10 aa, synthetic construct
SRPRGDVRTL

SEQ ID NO: 142094 - protein, 10 aa, synthetic construct
SRLRGDVRTL

SEQ ID NO: 142095 - protein, 10 aa, synthetic construct
SRIRGDVRTL

SEQ ID NO: 142096 - protein, 10 aa, synthetic construct
SRMRGDVRTL

SEQ ID NO: 142097 - protein, 10 aa, synthetic construct
SRWRGDVRTL

SEQ ID NO: 142098 - protein, 10 aa, synthetic construct
SRFRGDVRTL

SEQ ID NO: 142099 - protein, 10 aa, synthetic construct
SRKRGDVRTL

SEQ ID NO: 142100 - protein, 10 aa, synthetic construct
SRRRGDVRTL

SEQ ID NO: 142101 - protein, 10 aa, synthetic construct
SRHRGDVRTL

SEQ ID NO: 142102 - protein, 10 aa, synthetic construct
SRSRGDVRTL

SEQ ID NO: 142103 - protein, 10 aa, synthetic construct
SRTRGDVRTL

SEQ ID NO: 142104 - protein, 10 aa, synthetic construct
SRYRGDVRTL

SEQ ID NO: 142105 - protein, 10 aa, synthetic construct
SRNRGDVRTL

SEQ ID NO: 142106 - protein, 10 aa, synthetic construct
SRQRGDVRTL

SEQ ID NO: 142107 - protein, 10 aa, synthetic construct
SRDRGDVRTL

SEQ ID NO: 142108 - protein, 10 aa, synthetic construct
SRERGDVRTL

SEQ ID NO: 142109 - protein, 10 aa, synthetic construct
SHGRGDVRTL

SEQ ID NO: 142110 - protein, 10 aa, synthetic construct
SHARGDVRTL

SEQ ID NO: 142111 - protein, 10 aa, synthetic construct
SHVRGDVRTL

SEQ ID NO: 142112 - protein, 10 aa, synthetic construct
SHPRGDVRTL

SEQ ID NO: 142113 - protein, 10 aa, synthetic construct
SHLRGDVRTL

SEQ ID NO: 142114 - protein, 10 aa, synthetic construct
SHIRGDVRTL

SEQ ID NO: 142115 - protein, 10 aa, synthetic construct
SHMRGDVRTL

SEQ ID NO: 142116 - protein, 10 aa, synthetic construct
SHWRGDVRTL

SEQ ID NO: 142117 - protein, 10 aa, synthetic construct
SHFRGDVRTL

SEQ ID NO: 142118 - protein, 10 aa, synthetic construct
SHKRGDVRTL

SEQ ID NO: 142119 - protein, 10 aa, synthetic construct
SHRRGDVRTL

SEQ ID NO: 142120 - protein, 10 aa, synthetic construct
SHHRGDVRTL

SEQ ID NO: 142121 - protein, 10 aa, synthetic construct
SHSRGDVRTL

SEQ ID NO: 142122 - protein, 10 aa, synthetic construct
SHTRGDVRTL

SEQ ID NO: 142123 - protein, 10 aa, synthetic construct
SHYRGDVRTL

SEQ ID NO: 142124 - protein, 10 aa, synthetic construct
SHNRGDVRTL

SEQ ID NO: 142125 - protein, 10 aa, synthetic construct
SHQRGDVRTL

SEQ ID NO: 142126 - protein, 10 aa, synthetic construct
SHDRGDVRTL

SEQ ID NO: 142127 - protein, 10 aa, synthetic construct
SHERGDVRTL

SEQ ID NO: 142128 - protein, 10 aa, synthetic construct
SSGRGDVRTL

SEQ ID NO: 142129 - protein, 10 aa, synthetic construct
SSARGDVRTL

SEQ ID NO: 142130 - protein, 10 aa, synthetic construct
SSVRGDVRTL

SEQ ID NO: 142131 - protein, 10 aa, synthetic construct
SSPRGDVRTL

SEQ ID NO: 142132 - protein, 10 aa, synthetic construct
SSLRGDVRTL

SEQ ID NO: 142133 - protein, 10 aa, synthetic construct
SSIRGDVRTL

SEQ ID NO: 142134 - protein, 10 aa, synthetic construct
SSMRGDVRTL

SEQ ID NO: 142135 - protein, 10 aa, synthetic construct
SSWRGDVRTL

SEQ ID NO: 142136 - protein, 10 aa, synthetic construct
SSFRGDVRTL

SEQ ID NO: 142137 - protein, 10 aa, synthetic construct
SSKRGDVRTL

SEQ ID NO: 142138 - protein, 10 aa, synthetic construct
SSRRGDVRTL

SEQ ID NO: 142139 - protein, 10 aa, synthetic construct
SSHRGDVRTL

SEQ ID NO: 142140 - protein, 10 aa, synthetic construct
SSSRGDVRTL

SEQ ID NO: 142141 - protein, 10 aa, synthetic construct
SSTRGDVRTL

SEQ ID NO: 142142 - protein, 10 aa, synthetic construct
SSYRGDVRTL

SEQ ID NO: 142143 - protein, 10 aa, synthetic construct
SSNRGDVRTL

SEQ ID NO: 142144 - protein, 10 aa, synthetic construct
SSQRGDVRTL

SEQ ID NO: 142145 - protein, 10 aa, synthetic construct
SSDRGDVRTL

SEQ ID NO: 142146 - protein, 10 aa, synthetic construct
SSERGDVRTL

SEQ ID NO: 142147 - protein, 10 aa, synthetic construct
STGRGDVRTL

SEQ ID NO: 142148 - protein, 10 aa, synthetic construct
STARGDVRTL

SEQ ID NO: 142149 - protein, 10 aa, synthetic construct
STVRGDVRTL

SEQ ID NO: 142150 - protein, 10 aa, synthetic construct
STPRGDVRTL

SEQ ID NO: 142151 - protein, 10 aa, synthetic construct
STLRGDVRTL

SEQ ID NO: 142152 - protein, 10 aa, synthetic construct
STIRGDVRTL

SEQ ID NO: 142153 - protein, 10 aa, synthetic construct
STMRGDVRTL

SEQ ID NO: 142154 - protein, 10 aa, synthetic construct
STWRGDVRTL

SEQ ID NO: 142155 - protein, 10 aa, synthetic construct
STFRGDVRTL

SEQ ID NO: 142156 - protein, 10 aa, synthetic construct
STKRGDVRTL

SEQ ID NO: 142157 - protein, 10 aa, synthetic construct
STRRGDVRTL

SEQ ID NO: 142158 - protein, 10 aa, synthetic construct
STHRGDVRTL

SEQ ID NO: 142159 - protein, 10 aa, synthetic construct
STSRGDVRTL

SEQ ID NO: 142160 - protein, 10 aa, synthetic construct
STTRGDVRTL

SEQ ID NO: 142161 - protein, 10 aa, synthetic construct
STYRGDVRTL

SEQ ID NO: 142162 - protein, 10 aa, synthetic construct
STNRGDVRTL

SEQ ID NO: 142163 - protein, 10 aa, synthetic construct
STQRGDVRTL

SEQ ID NO: 142164 - protein, 10 aa, synthetic construct
STDRGDVRTL

SEQ ID NO: 142165 - protein, 10 aa, synthetic construct
STERGDVRTL

SEQ ID NO: 142166 - protein, 10 aa, synthetic construct
SYGRGDVRTL

SEQ ID NO: 142167 - protein, 10 aa, synthetic construct
SYARGDVRTL

SEQ ID NO: 142168 - protein, 10 aa, synthetic construct
SYVRGDVRTL

SEQ ID NO: 142169 - protein, 10 aa, synthetic construct
SYPRGDVRTL

SEQ ID NO: 142170 - protein, 10 aa, synthetic construct
SYLRGDVRTL

SEQ ID NO: 142171 - protein, 10 aa, synthetic construct
SYIRGDVRTL

SEQ ID NO: 142172 - protein, 10 aa, synthetic construct
SYMRGDVRTL

SEQ ID NO: 142173 - protein, 10 aa, synthetic construct
SYWRGDVRTL

SEQ ID NO: 142174 - protein, 10 aa, synthetic construct
SYFRGDVRTL

SEQ ID NO: 142175 - protein, 10 aa, synthetic construct
SYKRGDVRTL

SEQ ID NO: 142176 - protein, 10 aa, synthetic construct
SYRRGDVRTL

SEQ ID NO: 142177 - protein, 10 aa, synthetic construct
SYHRGDVRTL

SEQ ID NO: 142178 - protein, 10 aa, synthetic construct
SYSRGDVRTL

SEQ ID NO: 142179 - protein, 10 aa, synthetic construct
SYTRGDVRTL

SEQ ID NO: 142180 - protein, 10 aa, synthetic construct
SYYRGDVRTL

SEQ ID NO: 142181 - protein, 10 aa, synthetic construct
SYNRGDVRTL

SEQ ID NO: 142182 - protein, 10 aa, synthetic construct
SYQRGDVRTL

SEQ ID NO: 142183 - protein, 10 aa, synthetic construct
SYDRGDVRTL

SEQ ID NO: 142184 - protein, 10 aa, synthetic construct
SYERGDVRTL

SEQ ID NO: 142185 - protein, 10 aa, synthetic construct
SNGRGDVRTL

SEQ ID NO: 142186 - protein, 10 aa, synthetic construct
SNARGDVRTL

SEQ ID NO: 142187 - protein, 10 aa, synthetic construct
SNVRGDVRTL

SEQ ID NO: 142188 - protein, 10 aa, synthetic construct
SNPRGDVRTL

SEQ ID NO: 142189 - protein, 10 aa, synthetic construct
SNLRGDVRTL

SEQ ID NO: 142190 - protein, 10 aa, synthetic construct
SNIRGDVRTL

SEQ ID NO: 142191 - protein, 10 aa, synthetic construct
SNMRGDVRTL

SEQ ID NO: 142192 - protein, 10 aa, synthetic construct
SNWRGDVRTL

SEQ ID NO: 142193 - protein, 10 aa, synthetic construct
SNFRGDVRTL

SEQ ID NO: 142194 - protein, 10 aa, synthetic construct
SNKRGDVRTL

SEQ ID NO: 142195 - protein, 10 aa, synthetic construct
SNRRGDVRTL

SEQ ID NO: 142196 - protein, 10 aa, synthetic construct
SNHRGDVRTL

SEQ ID NO: 142197 - protein, 10 aa, synthetic construct
SNSRGDVRTL

SEQ ID NO: 142198 - protein, 10 aa, synthetic construct
SNTRGDVRTL

SEQ ID NO: 142199 - protein, 10 aa, synthetic construct
SNYRGDVRTL

SEQ ID NO: 142200 - protein, 10 aa, synthetic construct
SNNRGDVRTL

SEQ ID NO: 142201 - protein, 10 aa, synthetic construct
SNQRGDVRTL

SEQ ID NO: 142202 - protein, 10 aa, synthetic construct
SNDRGDVRTL

SEQ ID NO: 142203 - protein, 10 aa, synthetic construct
SNERGDVRTL

SEQ ID NO: 142204 - protein, 10 aa, synthetic construct
SQGRGDVRTL

SEQ ID NO: 142205 - protein, 10 aa, synthetic construct
SQARGDVRTL

SEQ ID NO: 142206 - protein, 10 aa, synthetic construct
SQVRGDVRTL

SEQ ID NO: 142207 - protein, 10 aa, synthetic construct
SQPRGDVRTL

SEQ ID NO: 142208 - protein, 10 aa, synthetic construct
SQLRGDVRTL

SEQ ID NO: 142209 - protein, 10 aa, synthetic construct
SQIRGDVRTL

SEQ ID NO: 142210 - protein, 10 aa, synthetic construct
SQMRGDVRTL

SEQ ID NO: 142211 - protein, 10 aa, synthetic construct
SQWRGDVRTL

SEQ ID NO: 142212 - protein, 10 aa, synthetic construct
SQFRGDVRTL

SEQ ID NO: 142213 - protein, 10 aa, synthetic construct
SQKRGDVRTL

SEQ ID NO: 142214 - protein, 10 aa, synthetic construct
SQRRGDVRTL

SEQ ID NO: 142215 - protein, 10 aa, synthetic construct
SQHRGDVRTL

SEQ ID NO: 142216 - protein, 10 aa, synthetic construct
SQSRGDVRTL

SEQ ID NO: 142217 - protein, 10 aa, synthetic construct
SQTRGDVRTL

SEQ ID NO: 142218 - protein, 10 aa, synthetic construct
SQYRGDVRTL

SEQ ID NO: 142219 - protein, 10 aa, synthetic construct
SQNRGDVRTL

SEQ ID NO: 142220 - protein, 10 aa, synthetic construct
SQQRGDVRTL

SEQ ID NO: 142221 - protein, 10 aa, synthetic construct
SQDRGDVRTL

SEQ ID NO: 142222 - protein, 10 aa, synthetic construct
SQERGDVRTL

SEQ ID NO: 142223 - protein, 10 aa, synthetic construct
SDGRGDVRTL

SEQ ID NO: 142224 - protein, 10 aa, synthetic construct
SDARGDVRTL

SEQ ID NO: 142225 - protein, 10 aa, synthetic construct
SDVRGDVRTL

SEQ ID NO: 142226 - protein, 10 aa, synthetic construct
SDPRGDVRTL

SEQ ID NO: 142227 - protein, 10 aa, synthetic construct
SDLRGDVRTL

SEQ ID NO: 142228 - protein, 10 aa, synthetic construct
SDIRGDVRTL

SEQ ID NO: 142229 - protein, 10 aa, synthetic construct
SDMRGDVRTL

SEQ ID NO: 142230 - protein, 10 aa, synthetic construct
SDWRGDVRTL

SEQ ID NO: 142231 - protein, 10 aa, synthetic construct
SDFRGDVRTL

SEQ ID NO: 142232 - protein, 10 aa, synthetic construct
SDKRGDVRTL

SEQ ID NO: 142233 - protein, 10 aa, synthetic construct
SDRRGDVRTL

SEQ ID NO: 142234 - protein, 10 aa, synthetic construct
SDHRGDVRTL

SEQ ID NO: 142235 - protein, 10 aa, synthetic construct
SDSRGDVRTL

SEQ ID NO: 142236 - protein, 10 aa, synthetic construct
SDTRGDVRTL

SEQ ID NO: 142237 - protein, 10 aa, synthetic construct
SDYRGDVRTL

SEQ ID NO: 142238 - protein, 10 aa, synthetic construct
SDNRGDVRTL

SEQ ID NO: 142239 - protein, 10 aa, synthetic construct
SDQRGDVRTL

SEQ ID NO: 142240 - protein, 10 aa, synthetic construct
SDDRGDVRTL

SEQ ID NO: 142241 - protein, 10 aa, synthetic construct
SDERGDVRTL

SEQ ID NO: 142242 - protein, 10 aa, synthetic construct
SEGRGDVRTL

SEQ ID NO: 142243 - protein, 10 aa, synthetic construct
SEARGDVRTL

SEQ ID NO: 142244 - protein, 10 aa, synthetic construct
SEVRGDVRTL

SEQ ID NO: 142245 - protein, 10 aa, synthetic construct
SEPRGDVRTL

SEQ ID NO: 142246 - protein, 10 aa, synthetic construct
SELRGDVRTL

SEQ ID NO: 142247 - protein, 10 aa, synthetic construct
SEIRGDVRTL

SEQ ID NO: 142248 - protein, 10 aa, synthetic construct
SEMRGDVRTL

SEQ ID NO: 142249 - protein, 10 aa, synthetic construct
SEWRGDVRTL

SEQ ID NO: 142250 - protein, 10 aa, synthetic construct
SEFRGDVRTL

SEQ ID NO: 142251 - protein, 10 aa, synthetic construct
SEKRGDVRTL

SEQ ID NO: 142252 - protein, 10 aa, synthetic construct
SERRGDVRTL

SEQ ID NO: 142253 - protein, 10 aa, synthetic construct
SEHRGDVRTL

SEQ ID NO: 142254 - protein, 10 aa, synthetic construct
SESRGDVRTL

SEQ ID NO: 142255 - protein, 10 aa, synthetic construct
SETRGDVRTL

SEQ ID NO: 142256 - protein, 10 aa, synthetic construct
SEYRGDVRTL

SEQ ID NO: 142257 - protein, 10 aa, synthetic construct
SENRGDVRTL

SEQ ID NO: 142258 - protein, 10 aa, synthetic construct
SEQRGDVRTL

SEQ ID NO: 142259 - protein, 10 aa, synthetic construct
SEDRGDVRTL

SEQ ID NO: 142260 - protein, 10 aa, synthetic construct
SEERGDVRTL

SEQ ID NO: 142261 - protein, 10 aa, synthetic construct
TGGRGDVRTL

SEQ ID NO: 142262 - protein, 10 aa, synthetic construct
TGARGDVRTL

SEQ ID NO: 142263 - protein, 10 aa, synthetic construct
TGVRGDVRTL

SEQ ID NO: 142264 - protein, 10 aa, synthetic construct
TGPRGDVRTL

SEQ ID NO: 142265 - protein, 10 aa, synthetic construct
TGLRGDVRTL

SEQ ID NO: 142266 - protein, 10 aa, synthetic construct
TGIRGDVRTL

SEQ ID NO: 142267 - protein, 10 aa, synthetic construct
TGMRGDVRTL

SEQ ID NO: 142268 - protein, 10 aa, synthetic construct
TGWRGDVRTL

SEQ ID NO: 142269 - protein, 10 aa, synthetic construct
TGFRGDVRTL

SEQ ID NO: 142270 - protein, 10 aa, synthetic construct
TGKRGDVRTL

SEQ ID NO: 142271 - protein, 10 aa, synthetic construct
TGRRGDVRTL

SEQ ID NO: 142272 - protein, 10 aa, synthetic construct
TGHRGDVRTL

SEQ ID NO: 142273 - protein, 10 aa, synthetic construct
TGSRGDVRTL

SEQ ID NO: 142274 - protein, 10 aa, synthetic construct
TGTRGDVRTL

SEQ ID NO: 142275 - protein, 10 aa, synthetic construct
TGYRGDVRTL

SEQ ID NO: 142276 - protein, 10 aa, synthetic construct
TGNRGDVRTL

SEQ ID NO: 142277 - protein, 10 aa, synthetic construct
TGQRGDVRTL

SEQ ID NO: 142278 - protein, 10 aa, synthetic construct
TGDRGDVRTL

SEQ ID NO: 142279 - protein, 10 aa, synthetic construct
TGERGDVRTL

SEQ ID NO: 142280 - protein, 10 aa, synthetic construct
TAGRGDVRTL

SEQ ID NO: 142281 - protein, 10 aa, synthetic construct
TAARGDVRTL

SEQ ID NO: 142282 - protein, 10 aa, synthetic construct
TAVRGDVRTL

SEQ ID NO: 142283 - protein, 10 aa, synthetic construct
TAPRGDVRTL

SEQ ID NO: 142284 - protein, 10 aa, synthetic construct
TALRGDVRTL

SEQ ID NO: 142285 - protein, 10 aa, synthetic construct
TAIRGDVRTL

SEQ ID NO: 142286 - protein, 10 aa, synthetic construct
TAMRGDVRTL

SEQ ID NO: 142287 - protein, 10 aa, synthetic construct
TAWRGDVRTL

SEQ ID NO: 142288 - protein, 10 aa, synthetic construct
TAFRGDVRTL

SEQ ID NO: 142289 - protein, 10 aa, synthetic construct
TAKRGDVRTL

SEQ ID NO: 142290 - protein, 10 aa, synthetic construct
TARRGDVRTL

SEQ ID NO: 142291 - protein, 10 aa, synthetic construct
TAHRGDVRTL

SEQ ID NO: 142292 - protein, 10 aa, synthetic construct
TASRGDVRTL

SEQ ID NO: 142293 - protein, 10 aa, synthetic construct
TATRGDVRTL

SEQ ID NO: 142294 - protein, 10 aa, synthetic construct
TAYRGDVRTL

SEQ ID NO: 142295 - protein, 10 aa, synthetic construct
TANRGDVRTL

SEQ ID NO: 142296 - protein, 10 aa, synthetic construct
TAQRGDVRTL

SEQ ID NO: 142297 - protein, 10 aa, synthetic construct
TADRGDVRTL

SEQ ID NO: 142298 - protein, 10 aa, synthetic construct
TAERGDVRTL

SEQ ID NO: 142299 - protein, 10 aa, synthetic construct
TVGRGDVRTL

SEQ ID NO: 142300 - protein, 10 aa, synthetic construct
TVARGDVRTL

SEQ ID NO: 142301 - protein, 10 aa, synthetic construct
TVVRGDVRTL

SEQ ID NO: 142302 - protein, 10 aa, synthetic construct
TVPRGDVRTL

SEQ ID NO: 142303 - protein, 10 aa, synthetic construct
TVLRGDVRTL

SEQ ID NO: 142304 - protein, 10 aa, synthetic construct
TVIRGDVRTL

SEQ ID NO: 142305 - protein, 10 aa, synthetic construct
TVMRGDVRTL

SEQ ID NO: 142306 - protein, 10 aa, synthetic construct
TVWRGDVRTL

SEQ ID NO: 142307 - protein, 10 aa, synthetic construct
TVFRGDVRTL

SEQ ID NO: 142308 - protein, 10 aa, synthetic construct
TVKRGDVRTL

SEQ ID NO: 142309 - protein, 10 aa, synthetic construct
TVRRGDVRTL

SEQ ID NO: 142310 - protein, 10 aa, synthetic construct
TVHRGDVRTL

SEQ ID NO: 142311 - protein, 10 aa, synthetic construct
TVSRGDVRTL

SEQ ID NO: 142312 - protein, 10 aa, synthetic construct
TVTRGDVRTL

SEQ ID NO: 142313 - protein, 10 aa, synthetic construct
TVYRGDVRTL

SEQ ID NO: 142314 - protein, 10 aa, synthetic construct
TVNRGDVRTL

SEQ ID NO: 142315 - protein, 10 aa, synthetic construct
TVQRGDVRTL

SEQ ID NO: 142316 - protein, 10 aa, synthetic construct
TVDRGDVRTL

SEQ ID NO: 142317 - protein, 10 aa, synthetic construct
TVERGDVRTL

SEQ ID NO: 142318 - protein, 10 aa, synthetic construct
TPGRGDVRTL

SEQ ID NO: 142319 - protein, 10 aa, synthetic construct
TPARGDVRTL

SEQ ID NO: 142320 - protein, 10 aa, synthetic construct
TPVRGDVRTL

SEQ ID NO: 142321 - protein, 10 aa, synthetic construct
TPPRGDVRTL

SEQ ID NO: 142322 - protein, 10 aa, synthetic construct
TPLRGDVRTL

SEQ ID NO: 142323 - protein, 10 aa, synthetic construct
TPIRGDVRTL

SEQ ID NO: 142324 - protein, 10 aa, synthetic construct
TPMRGDVRTL

SEQ ID NO: 142325 - protein, 10 aa, synthetic construct
TPWRGDVRTL

SEQ ID NO: 142326 - protein, 10 aa, synthetic construct
TPFRGDVRTL

SEQ ID NO: 142327 - protein, 10 aa, synthetic construct
TPKRGDVRTL

SEQ ID NO: 142328 - protein, 10 aa, synthetic construct
TPRRGDVRTL

SEQ ID NO: 142329 - protein, 10 aa, synthetic construct
TPHRGDVRTL

SEQ ID NO: 142330 - protein, 10 aa, synthetic construct
TPSRGDVRTL

SEQ ID NO: 142331 - protein, 10 aa, synthetic construct
TPTRGDVRTL

SEQ ID NO: 142332 - protein, 10 aa, synthetic construct
TPYRGDVRTL

SEQ ID NO: 142333 - protein, 10 aa, synthetic construct
TPNRGDVRTL

SEQ ID NO: 142334 - protein, 10 aa, synthetic construct
TPQRGDVRTL

SEQ ID NO: 142335 - protein, 10 aa, synthetic construct
TPDRGDVRTL

SEQ ID NO: 142336 - protein, 10 aa, synthetic construct
TPERGDVRTL

SEQ ID NO: 142337 - protein, 10 aa, synthetic construct
TLGRGDVRTL

SEQ ID NO: 142338 - protein, 10 aa, synthetic construct
TLARGDVRTL

SEQ ID NO: 142339 - protein, 10 aa, synthetic construct
TLVRGDVRTL

SEQ ID NO: 142340 - protein, 10 aa, synthetic construct
TLPRGDVRTL

SEQ ID NO: 142341 - protein, 10 aa, synthetic construct
TLLRGDVRTL

SEQ ID NO: 142342 - protein, 10 aa, synthetic construct
TLIRGDVRTL

SEQ ID NO: 142343 - protein, 10 aa, synthetic construct
TLMRGDVRTL

SEQ ID NO: 142344 - protein, 10 aa, synthetic construct
TLWRGDVRTL

SEQ ID NO: 142345 - protein, 10 aa, synthetic construct
TLFRGDVRTL

SEQ ID NO: 142346 - protein, 10 aa, synthetic construct
TLKRGDVRTL

SEQ ID NO: 142347 - protein, 10 aa, synthetic construct
TLRRGDVRTL

SEQ ID NO: 142348 - protein, 10 aa, synthetic construct
TLHRGDVRTL

SEQ ID NO: 142349 - protein, 10 aa, synthetic construct
TLSRGDVRTL

SEQ ID NO: 142350 - protein, 10 aa, synthetic construct
TLTRGDVRTL

SEQ ID NO: 142351 - protein, 10 aa, synthetic construct
TLYRGDVRTL

SEQ ID NO: 142352 - protein, 10 aa, synthetic construct
TLNRGDVRTL

SEQ ID NO: 142353 - protein, 10 aa, synthetic construct
TLQRGDVRTL

SEQ ID NO: 142354 - protein, 10 aa, synthetic construct
TLDRGDVRTL

SEQ ID NO: 142355 - protein, 10 aa, synthetic construct
TLERGDVRTL

SEQ ID NO: 142356 - protein, 10 aa, synthetic construct
TIGRGDVRTL

SEQ ID NO: 142357 - protein, 10 aa, synthetic construct
TIARGDVRTL

SEQ ID NO: 142358 - protein, 10 aa, synthetic construct
TIVRGDVRTL

SEQ ID NO: 142359 - protein, 10 aa, synthetic construct
TIPRGDVRTL

SEQ ID NO: 142360 - protein, 10 aa, synthetic construct
TILRGDVRTL

SEQ ID NO: 142361 - protein, 10 aa, synthetic construct
TIIRGDVRTL

SEQ ID NO: 142362 - protein, 10 aa, synthetic construct
TIMRGDVRTL

SEQ ID NO: 142363 - protein, 10 aa, synthetic construct
TIWRGDVRTL

SEQ ID NO: 142364 - protein, 10 aa, synthetic construct
TIFRGDVRTL

SEQ ID NO: 142365 - protein, 10 aa, synthetic construct
TIKRGDVRTL

SEQ ID NO: 142366 - protein, 10 aa, synthetic construct
TIRRGDVRTL

SEQ ID NO: 142367 - protein, 10 aa, synthetic construct
TIHRGDVRTL

SEQ ID NO: 142368 - protein, 10 aa, synthetic construct
TISRGDVRTL

SEQ ID NO: 142369 - protein, 10 aa, synthetic construct
TITRGDVRTL

SEQ ID NO: 142370 - protein, 10 aa, synthetic construct
TIYRGDVRTL

SEQ ID NO: 142371 - protein, 10 aa, synthetic construct
TINRGDVRTL

SEQ ID NO: 142372 - protein, 10 aa, synthetic construct
TIQRGDVRTL

SEQ ID NO: 142373 - protein, 10 aa, synthetic construct
TIDRGDVRTL

SEQ ID NO: 142374 - protein, 10 aa, synthetic construct
TIERGDVRTL

SEQ ID NO: 142375 - protein, 10 aa, synthetic construct
TMGRGDVRTL

SEQ ID NO: 142376 - protein, 10 aa, synthetic construct
TMARGDVRTL

SEQ ID NO: 142377 - protein, 10 aa, synthetic construct
TMVRGDVRTL

SEQ ID NO: 142378 - protein, 10 aa, synthetic construct
TMPRGDVRTL

SEQ ID NO: 142379 - protein, 10 aa, synthetic construct
TMLRGDVRTL

SEQ ID NO: 142380 - protein, 10 aa, synthetic construct
TMIRGDVRTL

SEQ ID NO: 142381 - protein, 10 aa, synthetic construct
TMMRGDVRTL

SEQ ID NO: 142382 - protein, 10 aa, synthetic construct
TMWRGDVRTL

SEQ ID NO: 142383 - protein, 10 aa, synthetic construct
TMFRGDVRTL

SEQ ID NO: 142384 - protein, 10 aa, synthetic construct
TMKRGDVRTL

SEQ ID NO: 142385 - protein, 10 aa, synthetic construct
TMRRGDVRTL

SEQ ID NO: 142386 - protein, 10 aa, synthetic construct
TMHRGDVRTL

SEQ ID NO: 142387 - protein, 10 aa, synthetic construct
TMSRGDVRTL

SEQ ID NO: 142388 - protein, 10 aa, synthetic construct
TMTRGDVRTL

SEQ ID NO: 142389 - protein, 10 aa, synthetic construct
TMYRGDVRTL

SEQ ID NO: 142390 - protein, 10 aa, synthetic construct
TMNRGDVRTL

SEQ ID NO: 142391 - protein, 10 aa, synthetic construct
TMQRGDVRTL

SEQ ID NO: 142392 - protein, 10 aa, synthetic construct
TMDRGDVRTL

SEQ ID NO: 142393 - protein, 10 aa, synthetic construct
TMERGDVRTL

SEQ ID NO: 142394 - protein, 10 aa, synthetic construct
TWGRGDVRTL

SEQ ID NO: 142395 - protein, 10 aa, synthetic construct
TWARGDVRTL

SEQ ID NO: 142396 - protein, 10 aa, synthetic construct
TWVRGDVRTL

SEQ ID NO: 142397 - protein, 10 aa, synthetic construct
TWPRGDVRTL

SEQ ID NO: 142398 - protein, 10 aa, synthetic construct
TWLRGDVRTL

SEQ ID NO: 142399 - protein, 10 aa, synthetic construct
TWIRGDVRTL

SEQ ID NO: 142400 - protein, 10 aa, synthetic construct
TWMRGDVRTL

SEQ ID NO: 142401 - protein, 10 aa, synthetic construct
TWWRGDVRTL

SEQ ID NO: 142402 - protein, 10 aa, synthetic construct
TWFRGDVRTL

SEQ ID NO: 142403 - protein, 10 aa, synthetic construct
TWKRGDVRTL

SEQ ID NO: 142404 - protein, 10 aa, synthetic construct
TWRRGDVRTL

SEQ ID NO: 142405 - protein, 10 aa, synthetic construct
TWHRGDVRTL

SEQ ID NO: 142406 - protein, 10 aa, synthetic construct
TWSRGDVRTL

SEQ ID NO: 142407 - protein, 10 aa, synthetic construct
TWTRGDVRTL

SEQ ID NO: 142408 - protein, 10 aa, synthetic construct
TWYRGDVRTL

SEQ ID NO: 142409 - protein, 10 aa, synthetic construct
TWNRGDVRTL

SEQ ID NO: 142410 - protein, 10 aa, synthetic construct
TWQRGDVRTL

SEQ ID NO: 142411 - protein, 10 aa, synthetic construct
TWDRGDVRTL

SEQ ID NO: 142412 - protein, 10 aa, synthetic construct
TWERGDVRTL

SEQ ID NO: 142413 - protein, 10 aa, synthetic construct
TFGRGDVRTL

SEQ ID NO: 142414 - protein, 10 aa, synthetic construct
TFARGDVRTL

SEQ ID NO: 142415 - protein, 10 aa, synthetic construct
TFVRGDVRTL

SEQ ID NO: 142416 - protein, 10 aa, synthetic construct
TFPRGDVRTL

SEQ ID NO: 142417 - protein, 10 aa, synthetic construct
TFLRGDVRTL

SEQ ID NO: 142418 - protein, 10 aa, synthetic construct
TFIRGDVRTL

SEQ ID NO: 142419 - protein, 10 aa, synthetic construct
TFMRGDVRTL

SEQ ID NO: 142420 - protein, 10 aa, synthetic construct
TFWRGDVRTL

SEQ ID NO: 142421 - protein, 10 aa, synthetic construct
TFFRGDVRTL

SEQ ID NO: 142422 - protein, 10 aa, synthetic construct
TFKRGDVRTL

SEQ ID NO: 142423 - protein, 10 aa, synthetic construct
TFRRGDVRTL

SEQ ID NO: 142424 - protein, 10 aa, synthetic construct
TFHRGDVRTL

SEQ ID NO: 142425 - protein, 10 aa, synthetic construct
TFSRGDVRTL

SEQ ID NO: 142426 - protein, 10 aa, synthetic construct
TFTRGDVRTL

SEQ ID NO: 142427 - protein, 10 aa, synthetic construct
TFYRGDVRTL

SEQ ID NO: 142428 - protein, 10 aa, synthetic construct
TFNRGDVRTL

SEQ ID NO: 142429 - protein, 10 aa, synthetic construct
TFQRGDVRTL

SEQ ID NO: 142430 - protein, 10 aa, synthetic construct
TFDRGDVRTL

SEQ ID NO: 142431 - protein, 10 aa, synthetic construct
TFERGDVRTL

SEQ ID NO: 142432 - protein, 10 aa, synthetic construct
TKGRGDVRTL

SEQ ID NO: 142433 - protein, 10 aa, synthetic construct
TKARGDVRTL

SEQ ID NO: 142434 - protein, 10 aa, synthetic construct
TKVRGDVRTL

SEQ ID NO: 142435 - protein, 10 aa, synthetic construct
TKPRGDVRTL

SEQ ID NO: 142436 - protein, 10 aa, synthetic construct
TKLRGDVRTL

SEQ ID NO: 142437 - protein, 10 aa, synthetic construct
TKIRGDVRTL

SEQ ID NO: 142438 - protein, 10 aa, synthetic construct
TKMRGDVRTL

SEQ ID NO: 142439 - protein, 10 aa, synthetic construct
TKWRGDVRTL

SEQ ID NO: 142440 - protein, 10 aa, synthetic construct
TKFRGDVRTL

SEQ ID NO: 142441 - protein, 10 aa, synthetic construct
TKKRGDVRTL

SEQ ID NO: 142442 - protein, 10 aa, synthetic construct
TKRRGDVRTL

SEQ ID NO: 142443 - protein, 10 aa, synthetic construct
TKHRGDVRTL

SEQ ID NO: 142444 - protein, 10 aa, synthetic construct
TKSRGDVRTL

SEQ ID NO: 142445 - protein, 10 aa, synthetic construct
TKTRGDVRTL

SEQ ID NO: 142446 - protein, 10 aa, synthetic construct
TKYRGDVRTL

SEQ ID NO: 142447 - protein, 10 aa, synthetic construct
TKNRGDVRTL

SEQ ID NO: 142448 - protein, 10 aa, synthetic construct
TKQRGDVRTL

SEQ ID NO: 142449 - protein, 10 aa, synthetic construct
TKDRGDVRTL

SEQ ID NO: 142450 - protein, 10 aa, synthetic construct
TKERGDVRTL

SEQ ID NO: 142451 - protein, 10 aa, synthetic construct
TRGRGDVRTL

SEQ ID NO: 142452 - protein, 10 aa, synthetic construct
TRARGDVRTL

SEQ ID NO: 142453 - protein, 10 aa, synthetic construct
TRVRGDVRTL

SEQ ID NO: 142454 - protein, 10 aa, synthetic construct
TRPRGDVRTL

SEQ ID NO: 142455 - protein, 10 aa, synthetic construct
TRLRGDVRTL

SEQ ID NO: 142456 - protein, 10 aa, synthetic construct
TRIRGDVRTL

SEQ ID NO: 142457 - protein, 10 aa, synthetic construct
TRMRGDVRTL

SEQ ID NO: 142458 - protein, 10 aa, synthetic construct
TRWRGDVRTL

SEQ ID NO: 142459 - protein, 10 aa, synthetic construct
TRFRGDVRTL

SEQ ID NO: 142460 - protein, 10 aa, synthetic construct
TRKRGDVRTL

SEQ ID NO: 142461 - protein, 10 aa, synthetic construct
TRRRGDVRTL

SEQ ID NO: 142462 - protein, 10 aa, synthetic construct
TRHRGDVRTL

SEQ ID NO: 142463 - protein, 10 aa, synthetic construct
TRSRGDVRTL

SEQ ID NO: 142464 - protein, 10 aa, synthetic construct
TRTRGDVRTL

SEQ ID NO: 142465 - protein, 10 aa, synthetic construct
TRYRGDVRTL

SEQ ID NO: 142466 - protein, 10 aa, synthetic construct
TRNRGDVRTL

SEQ ID NO: 142467 - protein, 10 aa, synthetic construct
TRQRGDVRTL

SEQ ID NO: 142468 - protein, 10 aa, synthetic construct
TRDRGDVRTL

SEQ ID NO: 142469 - protein, 10 aa, synthetic construct
TRERGDVRTL

SEQ ID NO: 142470 - protein, 10 aa, synthetic construct
THGRGDVRTL

SEQ ID NO: 142471 - protein, 10 aa, synthetic construct
THARGDVRTL

SEQ ID NO: 142472 - protein, 10 aa, synthetic construct
THVRGDVRTL

SEQ ID NO: 142473 - protein, 10 aa, synthetic construct
THPRGDVRTL

SEQ ID NO: 142474 - protein, 10 aa, synthetic construct
THLRGDVRTL

SEQ ID NO: 142475 - protein, 10 aa, synthetic construct
THIRGDVRTL

SEQ ID NO: 142476 - protein, 10 aa, synthetic construct
THMRGDVRTL

SEQ ID NO: 142477 - protein, 10 aa, synthetic construct
THWRGDVRTL

SEQ ID NO: 142478 - protein, 10 aa, synthetic construct
THFRGDVRTL

SEQ ID NO: 142479 - protein, 10 aa, synthetic construct
THKRGDVRTL

SEQ ID NO: 142480 - protein, 10 aa, synthetic construct
THRRGDVRTL

SEQ ID NO: 142481 - protein, 10 aa, synthetic construct
THHRGDVRTL

SEQ ID NO: 142482 - protein, 10 aa, synthetic construct
THSRGDVRTL

SEQ ID NO: 142483 - protein, 10 aa, synthetic construct
THTRGDVRTL

SEQ ID NO: 142484 - protein, 10 aa, synthetic construct
THYRGDVRTL

SEQ ID NO: 142485 - protein, 10 aa, synthetic construct
THNRGDVRTL

SEQ ID NO: 142486 - protein, 10 aa, synthetic construct
THQRGDVRTL

SEQ ID NO: 142487 - protein, 10 aa, synthetic construct
THDRGDVRTL

SEQ ID NO: 142488 - protein, 10 aa, synthetic construct
THERGDVRTL

SEQ ID NO: 142489 - protein, 10 aa, synthetic construct
TSGRGDVRTL

SEQ ID NO: 142490 - protein, 10 aa, synthetic construct
TSARGDVRTL

SEQ ID NO: 142491 - protein, 10 aa, synthetic construct
TSVRGDVRTL

SEQ ID NO: 142492 - protein, 10 aa, synthetic construct
TSPRGDVRTL

SEQ ID NO: 142493 - protein, 10 aa, synthetic construct
TSLRGDVRTL

SEQ ID NO: 142494 - protein, 10 aa, synthetic construct
TSIRGDVRTL

SEQ ID NO: 142495 - protein, 10 aa, synthetic construct
TSMRGDVRTL

SEQ ID NO: 142496 - protein, 10 aa, synthetic construct
TSWRGDVRTL

SEQ ID NO: 142497 - protein, 10 aa, synthetic construct
TSFRGDVRTL

SEQ ID NO: 142498 - protein, 10 aa, synthetic construct
TSKRGDVRTL

SEQ ID NO: 142499 - protein, 10 aa, synthetic construct
TSRRGDVRTL

SEQ ID NO: 142500 - protein, 10 aa, synthetic construct
TSHRGDVRTL

SEQ ID NO: 142501 - protein, 10 aa, synthetic construct
TSSRGDVRTL

SEQ ID NO: 142502 - protein, 10 aa, synthetic construct
TSTRGDVRTL

SEQ ID NO: 142503 - protein, 10 aa, synthetic construct
TSYRGDVRTL

SEQ ID NO: 142504 - protein, 10 aa, synthetic construct
TSNRGDVRTL

SEQ ID NO: 142505 - protein, 10 aa, synthetic construct
TSQRGDVRTL

SEQ ID NO: 142506 - protein, 10 aa, synthetic construct
TSDRGDVRTL

SEQ ID NO: 142507 - protein, 10 aa, synthetic construct
TSERGDVRTL

SEQ ID NO: 142508 - protein, 10 aa, synthetic construct
TTGRGDVRTL

SEQ ID NO: 142509 - protein, 10 aa, synthetic construct
TTARGDVRTL

SEQ ID NO: 142510 - protein, 10 aa, synthetic construct
TTVRGDVRTL

SEQ ID NO: 142511 - protein, 10 aa, synthetic construct
TTPRGDVRTL

SEQ ID NO: 142512 - protein, 10 aa, synthetic construct
TTLRGDVRTL

SEQ ID NO: 142513 - protein, 10 aa, synthetic construct
TTIRGDVRTL

SEQ ID NO: 142514 - protein, 10 aa, synthetic construct
TTMRGDVRTL

SEQ ID NO: 142515 - protein, 10 aa, synthetic construct
TTWRGDVRTL

SEQ ID NO: 142516 - protein, 10 aa, synthetic construct
TTFRGDVRTL

SEQ ID NO: 142517 - protein, 10 aa, synthetic construct
TTKRGDVRTL

SEQ ID NO: 142518 - protein, 10 aa, synthetic construct
TTRRGDVRTL

SEQ ID NO: 142519 - protein, 10 aa, synthetic construct
TTHRGDVRTL

SEQ ID NO: 142520 - protein, 10 aa, synthetic construct
TTSRGDVRTL

SEQ ID NO: 142521 - protein, 10 aa, synthetic construct
TTTRGDVRTL

SEQ ID NO: 142522 - protein, 10 aa, synthetic construct
TTYRGDVRTL

SEQ ID NO: 142523 - protein, 10 aa, synthetic construct
TTNRGDVRTL

SEQ ID NO: 142524 - protein, 10 aa, synthetic construct
TTQRGDVRTL

SEQ ID NO: 142525 - protein, 10 aa, synthetic construct
TTDRGDVRTL

SEQ ID NO: 142526 - protein, 10 aa, synthetic construct
TTERGDVRTL

SEQ ID NO: 142527 - protein, 10 aa, synthetic construct
TYGRGDVRTL

SEQ ID NO: 142528 - protein, 10 aa, synthetic construct
TYARGDVRTL

SEQ ID NO: 142529 - protein, 10 aa, synthetic construct
TYVRGDVRTL

SEQ ID NO: 142530 - protein, 10 aa, synthetic construct
TYPRGDVRTL

SEQ ID NO: 142531 - protein, 10 aa, synthetic construct
TYLRGDVRTL

SEQ ID NO: 142532 - protein, 10 aa, synthetic construct
TYIRGDVRTL

SEQ ID NO: 142533 - protein, 10 aa, synthetic construct
TYMRGDVRTL

SEQ ID NO: 142534 - protein, 10 aa, synthetic construct
TYWRGDVRTL

SEQ ID NO: 142535 - protein, 10 aa, synthetic construct
TYFRGDVRTL

SEQ ID NO: 142536 - protein, 10 aa, synthetic construct
TYKRGDVRTL

SEQ ID NO: 142537 - protein, 10 aa, synthetic construct
TYRRGDVRTL

SEQ ID NO: 142538 - protein, 10 aa, synthetic construct
TYHRGDVRTL

SEQ ID NO: 142539 - protein, 10 aa, synthetic construct
TYSRGDVRTL

SEQ ID NO: 142540 - protein, 10 aa, synthetic construct
TYTRGDVRTL

SEQ ID NO: 142541 - protein, 10 aa, synthetic construct
TYYRGDVRTL

SEQ ID NO: 142542 - protein, 10 aa, synthetic construct
TYNRGDVRTL

SEQ ID NO: 142543 - protein, 10 aa, synthetic construct
TYQRGDVRTL

SEQ ID NO: 142544 - protein, 10 aa, synthetic construct
TYDRGDVRTL

SEQ ID NO: 142545 - protein, 10 aa, synthetic construct
TYERGDVRTL

SEQ ID NO: 142546 - protein, 10 aa, synthetic construct
TNGRGDVRTL

SEQ ID NO: 142547 - protein, 10 aa, synthetic construct
TNARGDVRTL

SEQ ID NO: 142548 - protein, 10 aa, synthetic construct
TNVRGDVRTL

SEQ ID NO: 142549 - protein, 10 aa, synthetic construct
TNPRGDVRTL

SEQ ID NO: 142550 - protein, 10 aa, synthetic construct
TNLRGDVRTL

SEQ ID NO: 142551 - protein, 10 aa, synthetic construct
TNIRGDVRTL

SEQ ID NO: 142552 - protein, 10 aa, synthetic construct
TNMRGDVRTL

SEQ ID NO: 142553 - protein, 10 aa, synthetic construct
TNWRGDVRTL

SEQ ID NO: 142554 - protein, 10 aa, synthetic construct
TNFRGDVRTL

SEQ ID NO: 142555 - protein, 10 aa, synthetic construct
TNKRGDVRTL

SEQ ID NO: 142556 - protein, 10 aa, synthetic construct
TNRRGDVRTL

SEQ ID NO: 142557 - protein, 10 aa, synthetic construct
TNHRGDVRTL

SEQ ID NO: 142558 - protein, 10 aa, synthetic construct
TNSRGDVRTL

SEQ ID NO: 142559 - protein, 10 aa, synthetic construct
TNTRGDVRTL

SEQ ID NO: 142560 - protein, 10 aa, synthetic construct
TNYRGDVRTL

SEQ ID NO: 142561 - protein, 10 aa, synthetic construct
TNNRGDVRTL

SEQ ID NO: 142562 - protein, 10 aa, synthetic construct
TNQRGDVRTL

SEQ ID NO: 142563 - protein, 10 aa, synthetic construct
TNDRGDVRTL

SEQ ID NO: 142564 - protein, 10 aa, synthetic construct
TNERGDVRTL

SEQ ID NO: 142565 - protein, 10 aa, synthetic construct
TQGRGDVRTL

SEQ ID NO: 142566 - protein, 10 aa, synthetic construct
TQARGDVRTL

SEQ ID NO: 142567 - protein, 10 aa, synthetic construct
TQVRGDVRTL

SEQ ID NO: 142568 - protein, 10 aa, synthetic construct
TQPRGDVRTL

SEQ ID NO: 142569 - protein, 10 aa, synthetic construct
TQLRGDVRTL

SEQ ID NO: 142570 - protein, 10 aa, synthetic construct
TQIRGDVRTL

SEQ ID NO: 142571 - protein, 10 aa, synthetic construct
TQMRGDVRTL

SEQ ID NO: 142572 - protein, 10 aa, synthetic construct
TQWRGDVRTL

SEQ ID NO: 142573 - protein, 10 aa, synthetic construct
TQFRGDVRTL

SEQ ID NO: 142574 - protein, 10 aa, synthetic construct
TQKRGDVRTL

SEQ ID NO: 142575 - protein, 10 aa, synthetic construct
TQRRGDVRTL

SEQ ID NO: 142576 - protein, 10 aa, synthetic construct
TQHRGDVRTL

SEQ ID NO: 142577 - protein, 10 aa, synthetic construct
TQSRGDVRTL

SEQ ID NO: 142578 - protein, 10 aa, synthetic construct
TQTRGDVRTL

SEQ ID NO: 142579 - protein, 10 aa, synthetic construct
TQYRGDVRTL

SEQ ID NO: 142580 - protein, 10 aa, synthetic construct
TQNRGDVRTL

SEQ ID NO: 142581 - protein, 10 aa, synthetic construct
TQQRGDVRTL

SEQ ID NO: 142582 - protein, 10 aa, synthetic construct
TQDRGDVRTL

SEQ ID NO: 142583 - protein, 10 aa, synthetic construct
TQERGDVRTL

SEQ ID NO: 142584 - protein, 10 aa, synthetic construct
TDGRGDVRTL

SEQ ID NO: 142585 - protein, 10 aa, synthetic construct
TDARGDVRTL

SEQ ID NO: 142586 - protein, 10 aa, synthetic construct
TDVRGDVRTL

SEQ ID NO: 142587 - protein, 10 aa, synthetic construct
TDPRGDVRTL

SEQ ID NO: 142588 - protein, 10 aa, synthetic construct
TDLRGDVRTL

SEQ ID NO: 142589 - protein, 10 aa, synthetic construct
TDIRGDVRTL

SEQ ID NO: 142590 - protein, 10 aa, synthetic construct
TDMRGDVRTL

SEQ ID NO: 142591 - protein, 10 aa, synthetic construct
TDWRGDVRTL

SEQ ID NO: 142592 - protein, 10 aa, synthetic construct
TDFRGDVRTL

SEQ ID NO: 142593 - protein, 10 aa, synthetic construct
TDKRGDVRTL

SEQ ID NO: 142594 - protein, 10 aa, synthetic construct
TDRRGDVRTL

SEQ ID NO: 142595 - protein, 10 aa, synthetic construct
TDHRGDVRTL

SEQ ID NO: 142596 - protein, 10 aa, synthetic construct
TDSRGDVRTL

SEQ ID NO: 142597 - protein, 10 aa, synthetic construct
TDTRGDVRTL

SEQ ID NO: 142598 - protein, 10 aa, synthetic construct
TDYRGDVRTL

SEQ ID NO: 142599 - protein, 10 aa, synthetic construct
TDNRGDVRTL

SEQ ID NO: 142600 - protein, 10 aa, synthetic construct
TDQRGDVRTL

SEQ ID NO: 142601 - protein, 10 aa, synthetic construct
TDDRGDVRTL

SEQ ID NO: 142602 - protein, 10 aa, synthetic construct
TDERGDVRTL

SEQ ID NO: 142603 - protein, 10 aa, synthetic construct
TEGRGDVRTL

SEQ ID NO: 142604 - protein, 10 aa, synthetic construct
TEARGDVRTL

SEQ ID NO: 142605 - protein, 10 aa, synthetic construct
TEVRGDVRTL

SEQ ID NO: 142606 - protein, 10 aa, synthetic construct
TEPRGDVRTL

SEQ ID NO: 142607 - protein, 10 aa, synthetic construct
TELRGDVRTL

SEQ ID NO: 142608 - protein, 10 aa, synthetic construct
TEIRGDVRTL

SEQ ID NO: 142609 - protein, 10 aa, synthetic construct
TEMRGDVRTL

SEQ ID NO: 142610 - protein, 10 aa, synthetic construct
TEWRGDVRTL

SEQ ID NO: 142611 - protein, 10 aa, synthetic construct
TEFRGDVRTL

SEQ ID NO: 142612 - protein, 10 aa, synthetic construct
TEKRGDVRTL

SEQ ID NO: 142613 - protein, 10 aa, synthetic construct
TERRGDVRTL

SEQ ID NO: 142614 - protein, 10 aa, synthetic construct
TEHRGDVRTL

SEQ ID NO: 142615 - protein, 10 aa, synthetic construct
TESRGDVRTL

SEQ ID NO: 142616 - protein, 10 aa, synthetic construct
TETRGDVRTL

SEQ ID NO: 142617 - protein, 10 aa, synthetic construct
TEYRGDVRTL

SEQ ID NO: 142618 - protein, 10 aa, synthetic construct
TENRGDVRTL

SEQ ID NO: 142619 - protein, 10 aa, synthetic construct
TEQRGDVRTL

SEQ ID NO: 142620 - protein, 10 aa, synthetic construct
TEDRGDVRTL

SEQ ID NO: 142621 - protein, 10 aa, synthetic construct
TEERGDVRTL

SEQ ID NO: 142622 - protein, 10 aa, synthetic construct
AGGRGDVRTL

SEQ ID NO: 142623 - protein, 10 aa, synthetic construct
AGARGDVRTL

SEQ ID NO: 142624 - protein, 10 aa, synthetic construct
AGVRGDVRTL

SEQ ID NO: 142625 - protein, 10 aa, synthetic construct
AGPRGDVRTL

SEQ ID NO: 142626 - protein, 10 aa, synthetic construct
AGLRGDVRTL

SEQ ID NO: 142627 - protein, 10 aa, synthetic construct
AGIRGDVRTL

SEQ ID NO: 142628 - protein, 10 aa, synthetic construct
AGMRGDVRTL

SEQ ID NO: 142629 - protein, 10 aa, synthetic construct
AGWRGDVRTL

SEQ ID NO: 142630 - protein, 10 aa, synthetic construct
AGFRGDVRTL

SEQ ID NO: 142631 - protein, 10 aa, synthetic construct
AGKRGDVRTL

SEQ ID NO: 142632 - protein, 10 aa, synthetic construct
AGRRGDVRTL

SEQ ID NO: 142633 - protein, 10 aa, synthetic construct
AGHRGDVRTL

SEQ ID NO: 142634 - protein, 10 aa, synthetic construct
AGSRGDVRTL

SEQ ID NO: 142635 - protein, 10 aa, synthetic construct
AGTRGDVRTL

SEQ ID NO: 142636 - protein, 10 aa, synthetic construct
AGYRGDVRTL

SEQ ID NO: 142637 - protein, 10 aa, synthetic construct
AGNRGDVRTL

SEQ ID NO: 142638 - protein, 10 aa, synthetic construct
AGQRGDVRTL

SEQ ID NO: 142639 - protein, 10 aa, synthetic construct
AGDRGDVRTL

SEQ ID NO: 142640 - protein, 10 aa, synthetic construct
AGERGDVRTL

SEQ ID NO: 142641 - protein, 10 aa, synthetic construct
AAGRGDVRTL

SEQ ID NO: 142642 - protein, 10 aa, synthetic construct
AAARGDVRTL

SEQ ID NO: 142643 - protein, 10 aa, synthetic construct
AAVRGDVRTL

SEQ ID NO: 142644 - protein, 10 aa, synthetic construct
AAPRGDVRTL

SEQ ID NO: 142645 - protein, 10 aa, synthetic construct
AALRGDVRTL

SEQ ID NO: 142646 - protein, 10 aa, synthetic construct
AAIRGDVRTL

SEQ ID NO: 142647 - protein, 10 aa, synthetic construct
AAMRGDVRTL

SEQ ID NO: 142648 - protein, 10 aa, synthetic construct
AAWRGDVRTL

SEQ ID NO: 142649 - protein, 10 aa, synthetic construct
AAFRGDVRTL

SEQ ID NO: 142650 - protein, 10 aa, synthetic construct
AAKRGDVRTL

SEQ ID NO: 142651 - protein, 10 aa, synthetic construct
AARRGDVRTL

SEQ ID NO: 142652 - protein, 10 aa, synthetic construct
AAHRGDVRTL

SEQ ID NO: 142653 - protein, 10 aa, synthetic construct
AASRGDVRTL

SEQ ID NO: 142654 - protein, 10 aa, synthetic construct
AATRGDVRTL

SEQ ID NO: 142655 - protein, 10 aa, synthetic construct
AAYRGDVRTL

SEQ ID NO: 142656 - protein, 10 aa, synthetic construct
AANRGDVRTL

SEQ ID NO: 142657 - protein, 10 aa, synthetic construct
AAQRGDVRTL

SEQ ID NO: 142658 - protein, 10 aa, synthetic construct
AADRGDVRTL

SEQ ID NO: 142659 - protein, 10 aa, synthetic construct
AAERGDVRTL

SEQ ID NO: 142660 - protein, 10 aa, synthetic construct
AVGRGDVRTL

SEQ ID NO: 142661 - protein, 10 aa, synthetic construct
AVARGDVRTL

SEQ ID NO: 142662 - protein, 10 aa, synthetic construct
AVVRGDVRTL

SEQ ID NO: 142663 - protein, 10 aa, synthetic construct
AVPRGDVRTL

SEQ ID NO: 142664 - protein, 10 aa, synthetic construct
AVLRGDVRTL

SEQ ID NO: 142665 - protein, 10 aa, synthetic construct
AVIRGDVRTL

SEQ ID NO: 142666 - protein, 10 aa, synthetic construct
AVMRGDVRTL

SEQ ID NO: 142667 - protein, 10 aa, synthetic construct
AVWRGDVRTL

SEQ ID NO: 142668 - protein, 10 aa, synthetic construct
AVFRGDVRTL

SEQ ID NO: 142669 - protein, 10 aa, synthetic construct
AVKRGDVRTL

SEQ ID NO: 142670 - protein, 10 aa, synthetic construct
AVRRGDVRTL

SEQ ID NO: 142671 - protein, 10 aa, synthetic construct
AVHRGDVRTL

SEQ ID NO: 142672 - protein, 10 aa, synthetic construct
AVSRGDVRTL

SEQ ID NO: 142673 - protein, 10 aa, synthetic construct
AVTRGDVRTL

SEQ ID NO: 142674 - protein, 10 aa, synthetic construct
AVYRGDVRTL

SEQ ID NO: 142675 - protein, 10 aa, synthetic construct
AVNRGDVRTL

SEQ ID NO: 142676 - protein, 10 aa, synthetic construct
AVQRGDVRTL

SEQ ID NO: 142677 - protein, 10 aa, synthetic construct
AVDRGDVRTL

SEQ ID NO: 142678 - protein, 10 aa, synthetic construct
AVERGDVRTL

SEQ ID NO: 142679 - protein, 10 aa, synthetic construct
APGRGDVRTL

SEQ ID NO: 142680 - protein, 10 aa, synthetic construct
APARGDVRTL

SEQ ID NO: 142681 - protein, 10 aa, synthetic construct
APVRGDVRTL

SEQ ID NO: 142682 - protein, 10 aa, synthetic construct
APPRGDVRTL

SEQ ID NO: 142683 - protein, 10 aa, synthetic construct
APLRGDVRTL

SEQ ID NO: 142684 - protein, 10 aa, synthetic construct
APIRGDVRTL

SEQ ID NO: 142685 - protein, 10 aa, synthetic construct
APMRGDVRTL

SEQ ID NO: 142686 - protein, 10 aa, synthetic construct
APWRGDVRTL

SEQ ID NO: 142687 - protein, 10 aa, synthetic construct
APFRGDVRTL

SEQ ID NO: 142688 - protein, 10 aa, synthetic construct
APKRGDVRTL

SEQ ID NO: 142689 - protein, 10 aa, synthetic construct
APRRGDVRTL

SEQ ID NO: 142690 - protein, 10 aa, synthetic construct
APHRGDVRTL

SEQ ID NO: 142691 - protein, 10 aa, synthetic construct
APSRGDVRTL

SEQ ID NO: 142692 - protein, 10 aa, synthetic construct
APTRGDVRTL

SEQ ID NO: 142693 - protein, 10 aa, synthetic construct
APYRGDVRTL

SEQ ID NO: 142694 - protein, 10 aa, synthetic construct
APNRGDVRTL

SEQ ID NO: 142695 - protein, 10 aa, synthetic construct
APQRGDVRTL

SEQ ID NO: 142696 - protein, 10 aa, synthetic construct
APDRGDVRTL

SEQ ID NO: 142697 - protein, 10 aa, synthetic construct
APERGDVRTL

SEQ ID NO: 142698 - protein, 10 aa, synthetic construct
ALGRGDVRTL

SEQ ID NO: 142699 - protein, 10 aa, synthetic construct
ALARGDVRTL

SEQ ID NO: 142700 - protein, 10 aa, synthetic construct
ALVRGDVRTL

SEQ ID NO: 142701 - protein, 10 aa, synthetic construct
ALPRGDVRTL

SEQ ID NO: 142702 - protein, 10 aa, synthetic construct
ALLRGDVRTL

SEQ ID NO: 142703 - protein, 10 aa, synthetic construct
ALIRGDVRTL

SEQ ID NO: 142704 - protein, 10 aa, synthetic construct
ALMRGDVRTL

SEQ ID NO: 142705 - protein, 10 aa, synthetic construct
ALWRGDVRTL

SEQ ID NO: 142706 - protein, 10 aa, synthetic construct
ALFRGDVRTL

SEQ ID NO: 142707 - protein, 10 aa, synthetic construct
ALKRGDVRTL

SEQ ID NO: 142708 - protein, 10 aa, synthetic construct
ALRRGDVRTL

SEQ ID NO: 142709 - protein, 10 aa, synthetic construct
ALHRGDVRTL

SEQ ID NO: 142710 - protein, 10 aa, synthetic construct
ALSRGDVRTL

SEQ ID NO: 142711 - protein, 10 aa, synthetic construct
ALTRGDVRTL

SEQ ID NO: 142712 - protein, 10 aa, synthetic construct
ALYRGDVRTL

SEQ ID NO: 142713 - protein, 10 aa, synthetic construct
ALNRGDVRTL

SEQ ID NO: 142714 - protein, 10 aa, synthetic construct
ALQRGDVRTL

SEQ ID NO: 142715 - protein, 10 aa, synthetic construct
ALDRGDVRTL

SEQ ID NO: 142716 - protein, 10 aa, synthetic construct
ALERGDVRTL

SEQ ID NO: 142717 - protein, 10 aa, synthetic construct
AIGRGDVRTL

SEQ ID NO: 142718 - protein, 10 aa, synthetic construct
AIARGDVRTL

SEQ ID NO: 142719 - protein, 10 aa, synthetic construct
AIVRGDVRTL

SEQ ID NO: 142720 - protein, 10 aa, synthetic construct
AIPRGDVRTL

SEQ ID NO: 142721 - protein, 10 aa, synthetic construct
AILRGDVRTL

SEQ ID NO: 142722 - protein, 10 aa, synthetic construct
AIIRGDVRTL

SEQ ID NO: 142723 - protein, 10 aa, synthetic construct
AIMRGDVRTL

SEQ ID NO: 142724 - protein, 10 aa, synthetic construct
AIWRGDVRTL

SEQ ID NO: 142725 - protein, 10 aa, synthetic construct
AIFRGDVRTL

SEQ ID NO: 142726 - protein, 10 aa, synthetic construct
AIKRGDVRTL

SEQ ID NO: 142727 - protein, 10 aa, synthetic construct
AIRRGDVRTL

SEQ ID NO: 142728 - protein, 10 aa, synthetic construct
AIHRGDVRTL

SEQ ID NO: 142729 - protein, 10 aa, synthetic construct
AISRGDVRTL

SEQ ID NO: 142730 - protein, 10 aa, synthetic construct
AITRGDVRTL

SEQ ID NO: 142731 - protein, 10 aa, synthetic construct
AIYRGDVRTL

SEQ ID NO: 142732 - protein, 10 aa, synthetic construct
AINRGDVRTL

SEQ ID NO: 142733 - protein, 10 aa, synthetic construct
AIQRGDVRTL

SEQ ID NO: 142734 - protein, 10 aa, synthetic construct
AIDRGDVRTL

SEQ ID NO: 142735 - protein, 10 aa, synthetic construct
AIERGDVRTL

SEQ ID NO: 142736 - protein, 10 aa, synthetic construct
AMGRGDVRTL

SEQ ID NO: 142737 - protein, 10 aa, synthetic construct
AMARGDVRTL

SEQ ID NO: 142738 - protein, 10 aa, synthetic construct
AMVRGDVRTL

SEQ ID NO: 142739 - protein, 10 aa, synthetic construct
AMPRGDVRTL

SEQ ID NO: 142740 - protein, 10 aa, synthetic construct
AMLRGDVRTL

SEQ ID NO: 142741 - protein, 10 aa, synthetic construct
AMIRGDVRTL

SEQ ID NO: 142742 - protein, 10 aa, synthetic construct
AMMRGDVRTL

SEQ ID NO: 142743 - protein, 10 aa, synthetic construct
AMWRGDVRTL

SEQ ID NO: 142744 - protein, 10 aa, synthetic construct
AMFRGDVRTL

SEQ ID NO: 142745 - protein, 10 aa, synthetic construct
AMKRGDVRTL

SEQ ID NO: 142746 - protein, 10 aa, synthetic construct
AMRRGDVRTL

SEQ ID NO: 142747 - protein, 10 aa, synthetic construct
AMHRGDVRTL

SEQ ID NO: 142748 - protein, 10 aa, synthetic construct
AMSRGDVRTL

SEQ ID NO: 142749 - protein, 10 aa, synthetic construct
AMTRGDVRTL

SEQ ID NO: 142750 - protein, 10 aa, synthetic construct
AMYRGDVRTL

SEQ ID NO: 142751 - protein, 10 aa, synthetic construct
AMNRGDVRTL

SEQ ID NO: 142752 - protein, 10 aa, synthetic construct
AMQRGDVRTL

SEQ ID NO: 142753 - protein, 10 aa, synthetic construct
AMDRGDVRTL

SEQ ID NO: 142754 - protein, 10 aa, synthetic construct
AMERGDVRTL

SEQ ID NO: 142755 - protein, 10 aa, synthetic construct
AWGRGDVRTL

SEQ ID NO: 142756 - protein, 10 aa, synthetic construct
AWARGDVRTL

SEQ ID NO: 142757 - protein, 10 aa, synthetic construct
AWVRGDVRTL

SEQ ID NO: 142758 - protein, 10 aa, synthetic construct
AWPRGDVRTL

SEQ ID NO: 142759 - protein, 10 aa, synthetic construct
AWLRGDVRTL

SEQ ID NO: 142760 - protein, 10 aa, synthetic construct
AWIRGDVRTL

SEQ ID NO: 142761 - protein, 10 aa, synthetic construct
AWMRGDVRTL

SEQ ID NO: 142762 - protein, 10 aa, synthetic construct
AWWRGDVRTL

SEQ ID NO: 142763 - protein, 10 aa, synthetic construct
AWFRGDVRTL

SEQ ID NO: 142764 - protein, 10 aa, synthetic construct
AWKRGDVRTL

SEQ ID NO: 142765 - protein, 10 aa, synthetic construct
AWRRGDVRTL

SEQ ID NO: 142766 - protein, 10 aa, synthetic construct
AWHRGDVRTL

SEQ ID NO: 142767 - protein, 10 aa, synthetic construct
AWSRGDVRTL

SEQ ID NO: 142768 - protein, 10 aa, synthetic construct
AWTRGDVRTL

SEQ ID NO: 142769 - protein, 10 aa, synthetic construct
AWYRGDVRTL

SEQ ID NO: 142770 - protein, 10 aa, synthetic construct
AWNRGDVRTL

SEQ ID NO: 142771 - protein, 10 aa, synthetic construct
AWQRGDVRTL

SEQ ID NO: 142772 - protein, 10 aa, synthetic construct
AWDRGDVRTL

SEQ ID NO: 142773 - protein, 10 aa, synthetic construct
AWERGDVRTL

SEQ ID NO: 142774 - protein, 10 aa, synthetic construct
AFGRGDVRTL

SEQ ID NO: 142775 - protein, 10 aa, synthetic construct
AFARGDVRTL

SEQ ID NO: 142776 - protein, 10 aa, synthetic construct
AFVRGDVRTL

SEQ ID NO: 142777 - protein, 10 aa, synthetic construct
AFPRGDVRTL

SEQ ID NO: 142778 - protein, 10 aa, synthetic construct
AFLRGDVRTL

SEQ ID NO: 142779 - protein, 10 aa, synthetic construct
AFIRGDVRTL

SEQ ID NO: 142780 - protein, 10 aa, synthetic construct
AFMRGDVRTL

SEQ ID NO: 142781 - protein, 10 aa, synthetic construct
AFWRGDVRTL

SEQ ID NO: 142782 - protein, 10 aa, synthetic construct
AFFRGDVRTL

SEQ ID NO: 142783 - protein, 10 aa, synthetic construct
AFKRGDVRTL

SEQ ID NO: 142784 - protein, 10 aa, synthetic construct
AFRRGDVRTL

SEQ ID NO: 142785 - protein, 10 aa, synthetic construct
AFHRGDVRTL

SEQ ID NO: 142786 - protein, 10 aa, synthetic construct
AFSRGDVRTL

SEQ ID NO: 142787 - protein, 10 aa, synthetic construct
AFTRGDVRTL

SEQ ID NO: 142788 - protein, 10 aa, synthetic construct
AFYRGDVRTL

SEQ ID NO: 142789 - protein, 10 aa, synthetic construct
AFNRGDVRTL

SEQ ID NO: 142790 - protein, 10 aa, synthetic construct
AFQRGDVRTL

SEQ ID NO: 142791 - protein, 10 aa, synthetic construct
AFDRGDVRTL

SEQ ID NO: 142792 - protein, 10 aa, synthetic construct
AFERGDVRTL

SEQ ID NO: 142793 - protein, 10 aa, synthetic construct
AKGRGDVRTL

SEQ ID NO: 142794 - protein, 10 aa, synthetic construct
AKARGDVRTL

SEQ ID NO: 142795 - protein, 10 aa, synthetic construct
AKVRGDVRTL

SEQ ID NO: 142796 - protein, 10 aa, synthetic construct
AKPRGDVRTL

SEQ ID NO: 142797 - protein, 10 aa, synthetic construct
AKLRGDVRTL

SEQ ID NO: 142798 - protein, 10 aa, synthetic construct
AKIRGDVRTL

SEQ ID NO: 142799 - protein, 10 aa, synthetic construct
AKMRGDVRTL

SEQ ID NO: 142800 - protein, 10 aa, synthetic construct
AKWRGDVRTL

SEQ ID NO: 142801 - protein, 10 aa, synthetic construct
AKFRGDVRTL

SEQ ID NO: 142802 - protein, 10 aa, synthetic construct
AKKRGDVRTL

SEQ ID NO: 142803 - protein, 10 aa, synthetic construct
AKRRGDVRTL

SEQ ID NO: 142804 - protein, 10 aa, synthetic construct
AKHRGDVRTL

SEQ ID NO: 142805 - protein, 10 aa, synthetic construct
AKSRGDVRTL

SEQ ID NO: 142806 - protein, 10 aa, synthetic construct
AKTRGDVRTL

SEQ ID NO: 142807 - protein, 10 aa, synthetic construct
AKYRGDVRTL

SEQ ID NO: 142808 - protein, 10 aa, synthetic construct
AKNRGDVRTL

SEQ ID NO: 142809 - protein, 10 aa, synthetic construct
AKQRGDVRTL

SEQ ID NO: 142810 - protein, 10 aa, synthetic construct
AKDRGDVRTL

SEQ ID NO: 142811 - protein, 10 aa, synthetic construct
AKERGDVRTL

SEQ ID NO: 142812 - protein, 10 aa, synthetic construct
ARGRGDVRTL

SEQ ID NO: 142813 - protein, 10 aa, synthetic construct
ARARGDVRTL

SEQ ID NO: 142814 - protein, 10 aa, synthetic construct
ARVRGDVRTL

SEQ ID NO: 142815 - protein, 10 aa, synthetic construct
ARPRGDVRTL

SEQ ID NO: 142816 - protein, 10 aa, synthetic construct
ARLRGDVRTL

SEQ ID NO: 142817 - protein, 10 aa, synthetic construct
ARIRGDVRTL

SEQ ID NO: 142818 - protein, 10 aa, synthetic construct
ARMRGDVRTL

SEQ ID NO: 142819 - protein, 10 aa, synthetic construct
ARWRGDVRTL

SEQ ID NO: 142820 - protein, 10 aa, synthetic construct
ARFRGDVRTL

SEQ ID NO: 142821 - protein, 10 aa, synthetic construct
ARKRGDVRTL

SEQ ID NO: 142822 - protein, 10 aa, synthetic construct
ARRRGDVRTL

SEQ ID NO: 142823 - protein, 10 aa, synthetic construct
ARHRGDVRTL

SEQ ID NO: 142824 - protein, 10 aa, synthetic construct
ARSRGDVRTL

SEQ ID NO: 142825 - protein, 10 aa, synthetic construct
ARTRGDVRTL

SEQ ID NO: 142826 - protein, 10 aa, synthetic construct
ARYRGDVRTL

SEQ ID NO: 142827 - protein, 10 aa, synthetic construct
ARNRGDVRTL

SEQ ID NO: 142828 - protein, 10 aa, synthetic construct
ARQRGDVRTL

SEQ ID NO: 142829 - protein, 10 aa, synthetic construct
ARDRGDVRTL

SEQ ID NO: 142830 - protein, 10 aa, synthetic construct
ARERGDVRTL

SEQ ID NO: 142831 - protein, 10 aa, synthetic construct
AHGRGDVRTL

SEQ ID NO: 142832 - protein, 10 aa, synthetic construct
AHARGDVRTL

SEQ ID NO: 142833 - protein, 10 aa, synthetic construct
AHVRGDVRTL

SEQ ID NO: 142834 - protein, 10 aa, synthetic construct
AHPRGDVRTL

SEQ ID NO: 142835 - protein, 10 aa, synthetic construct
AHLRGDVRTL

SEQ ID NO: 142836 - protein, 10 aa, synthetic construct
AHIRGDVRTL

SEQ ID NO: 142837 - protein, 10 aa, synthetic construct
AHMRGDVRTL

SEQ ID NO: 142838 - protein, 10 aa, synthetic construct
AHWRGDVRTL

SEQ ID NO: 142839 - protein, 10 aa, synthetic construct
AHFRGDVRTL

SEQ ID NO: 142840 - protein, 10 aa, synthetic construct
AHKRGDVRTL

SEQ ID NO: 142841 - protein, 10 aa, synthetic construct
AHRRGDVRTL

SEQ ID NO: 142842 - protein, 10 aa, synthetic construct
AHHRGDVRTL

SEQ ID NO: 142843 - protein, 10 aa, synthetic construct
AHSRGDVRTL

SEQ ID NO: 142844 - protein, 10 aa, synthetic construct
AHTRGDVRTL

SEQ ID NO: 142845 - protein, 10 aa, synthetic construct
AHYRGDVRTL

SEQ ID NO: 142846 - protein, 10 aa, synthetic construct
AHNRGDVRTL

SEQ ID NO: 142847 - protein, 10 aa, synthetic construct
AHQRGDVRTL

SEQ ID NO: 142848 - protein, 10 aa, synthetic construct
AHDRGDVRTL

SEQ ID NO: 142849 - protein, 10 aa, synthetic construct
AHERGDVRTL

SEQ ID NO: 142850 - protein, 10 aa, synthetic construct
ASGRGDVRTL

SEQ ID NO: 142851 - protein, 10 aa, synthetic construct
ASARGDVRTL

SEQ ID NO: 142852 - protein, 10 aa, synthetic construct
ASVRGDVRTL

SEQ ID NO: 142853 - protein, 10 aa, synthetic construct
ASPRGDVRTL

SEQ ID NO: 142854 - protein, 10 aa, synthetic construct
ASLRGDVRTL

SEQ ID NO: 142855 - protein, 10 aa, synthetic construct
ASIRGDVRTL

SEQ ID NO: 142856 - protein, 10 aa, synthetic construct
ASMRGDVRTL

SEQ ID NO: 142857 - protein, 10 aa, synthetic construct
ASWRGDVRTL

SEQ ID NO: 142858 - protein, 10 aa, synthetic construct
ASFRGDVRTL

SEQ ID NO: 142859 - protein, 10 aa, synthetic construct
ASKRGDVRTL

SEQ ID NO: 142860 - protein, 10 aa, synthetic construct
ASRRGDVRTL

SEQ ID NO: 142861 - protein, 10 aa, synthetic construct
ASHRGDVRTL

SEQ ID NO: 142862 - protein, 10 aa, synthetic construct
ASSRGDVRTL

SEQ ID NO: 142863 - protein, 10 aa, synthetic construct
ASTRGDVRTL

SEQ ID NO: 142864 - protein, 10 aa, synthetic construct
ASYRGDVRTL

SEQ ID NO: 142865 - protein, 10 aa, synthetic construct
ASNRGDVRTL

SEQ ID NO: 142866 - protein, 10 aa, synthetic construct
ASQRGDVRTL

SEQ ID NO: 142867 - protein, 10 aa, synthetic construct
ASDRGDVRTL

SEQ ID NO: 142868 - protein, 10 aa, synthetic construct
ASERGDVRTL

SEQ ID NO: 142869 - protein, 10 aa, synthetic construct
ATGRGDVRTL

SEQ ID NO: 142870 - protein, 10 aa, synthetic construct
ATARGDVRTL

SEQ ID NO: 142871 - protein, 10 aa, synthetic construct
ATVRGDVRTL

SEQ ID NO: 142872 - protein, 10 aa, synthetic construct
ATPRGDVRTL

SEQ ID NO: 142873 - protein, 10 aa, synthetic construct
ATLRGDVRTL

SEQ ID NO: 142874 - protein, 10 aa, synthetic construct
ATIRGDVRTL

SEQ ID NO: 142875 - protein, 10 aa, synthetic construct
ATMRGDVRTL

SEQ ID NO: 142876 - protein, 10 aa, synthetic construct
ATWRGDVRTL

SEQ ID NO: 142877 - protein, 10 aa, synthetic construct
ATFRGDVRTL

SEQ ID NO: 142878 - protein, 10 aa, synthetic construct
ATKRGDVRTL

SEQ ID NO: 142879 - protein, 10 aa, synthetic construct
ATRRGDVRTL

SEQ ID NO: 142880 - protein, 10 aa, synthetic construct
ATHRGDVRTL

SEQ ID NO: 142881 - protein, 10 aa, synthetic construct
ATSRGDVRTL

SEQ ID NO: 142882 - protein, 10 aa, synthetic construct
ATTRGDVRTL

SEQ ID NO: 142883 - protein, 10 aa, synthetic construct
ATYRGDVRTL

SEQ ID NO: 142884 - protein, 10 aa, synthetic construct
ATNRGDVRTL

SEQ ID NO: 142885 - protein, 10 aa, synthetic construct
ATQRGDVRTL

SEQ ID NO: 142886 - protein, 10 aa, synthetic construct
ATDRGDVRTL

SEQ ID NO: 142887 - protein, 10 aa, synthetic construct
ATERGDVRTL

SEQ ID NO: 142888 - protein, 10 aa, synthetic construct
AYGRGDVRTL

SEQ ID NO: 142889 - protein, 10 aa, synthetic construct
AYARGDVRTL

SEQ ID NO: 142890 - protein, 10 aa, synthetic construct
AYVRGDVRTL

SEQ ID NO: 142891 - protein, 10 aa, synthetic construct
AYPRGDVRTL

SEQ ID NO: 142892 - protein, 10 aa, synthetic construct
AYLRGDVRTL

SEQ ID NO: 142893 - protein, 10 aa, synthetic construct
AYIRGDVRTL

SEQ ID NO: 142894 - protein, 10 aa, synthetic construct
AYMRGDVRTL

SEQ ID NO: 142895 - protein, 10 aa, synthetic construct
AYWRGDVRTL

SEQ ID NO: 142896 - protein, 10 aa, synthetic construct
AYFRGDVRTL

SEQ ID NO: 142897 - protein, 10 aa, synthetic construct
AYKRGDVRTL

SEQ ID NO: 142898 - protein, 10 aa, synthetic construct
AYRRGDVRTL

SEQ ID NO: 142899 - protein, 10 aa, synthetic construct
AYHRGDVRTL

SEQ ID NO: 142900 - protein, 10 aa, synthetic construct
AYSRGDVRTL

SEQ ID NO: 142901 - protein, 10 aa, synthetic construct
AYTRGDVRTL

SEQ ID NO: 142902 - protein, 10 aa, synthetic construct
AYYRGDVRTL

SEQ ID NO: 142903 - protein, 10 aa, synthetic construct
AYNRGDVRTL

SEQ ID NO: 142904 - protein, 10 aa, synthetic construct
AYQRGDVRTL

SEQ ID NO: 142905 - protein, 10 aa, synthetic construct
AYDRGDVRTL

SEQ ID NO: 142906 - protein, 10 aa, synthetic construct
AYERGDVRTL

SEQ ID NO: 142907 - protein, 10 aa, synthetic construct
ANGRGDVRTL

SEQ ID NO: 142908 - protein, 10 aa, synthetic construct
ANARGDVRTL

SEQ ID NO: 142909 - protein, 10 aa, synthetic construct
ANVRGDVRTL

SEQ ID NO: 142910 - protein, 10 aa, synthetic construct
ANPRGDVRTL

SEQ ID NO: 142911 - protein, 10 aa, synthetic construct
ANLRGDVRTL

SEQ ID NO: 142912 - protein, 10 aa, synthetic construct
ANIRGDVRTL

SEQ ID NO: 142913 - protein, 10 aa, synthetic construct
ANMRGDVRTL

SEQ ID NO: 142914 - protein, 10 aa, synthetic construct
ANWRGDVRTL

SEQ ID NO: 142915 - protein, 10 aa, synthetic construct
ANFRGDVRTL

SEQ ID NO: 142916 - protein, 10 aa, synthetic construct
ANKRGDVRTL

SEQ ID NO: 142917 - protein, 10 aa, synthetic construct
ANRRGDVRTL

SEQ ID NO: 142918 - protein, 10 aa, synthetic construct
ANHRGDVRTL

SEQ ID NO: 142919 - protein, 10 aa, synthetic construct
ANSRGDVRTL

SEQ ID NO: 142920 - protein, 10 aa, synthetic construct
ANTRGDVRTL

SEQ ID NO: 142921 - protein, 10 aa, synthetic construct
ANYRGDVRTL

SEQ ID NO: 142922 - protein, 10 aa, synthetic construct
ANNRGDVRTL

SEQ ID NO: 142923 - protein, 10 aa, synthetic construct
ANQRGDVRTL

SEQ ID NO: 142924 - protein, 10 aa, synthetic construct
ANDRGDVRTL

SEQ ID NO: 142925 - protein, 10 aa, synthetic construct
ANERGDVRTL

SEQ ID NO: 142926 - protein, 10 aa, synthetic construct
AQGRGDVRTL

SEQ ID NO: 142927 - protein, 10 aa, synthetic construct
AQARGDVRTL

SEQ ID NO: 142928 - protein, 10 aa, synthetic construct
AQVRGDVRTL

SEQ ID NO: 142929 - protein, 10 aa, synthetic construct
AQPRGDVRTL

SEQ ID NO: 142930 - protein, 10 aa, synthetic construct
AQLRGDVRTL

SEQ ID NO: 142931 - protein, 10 aa, synthetic construct
AQIRGDVRTL

SEQ ID NO: 142932 - protein, 10 aa, synthetic construct
AQMRGDVRTL

SEQ ID NO: 142933 - protein, 10 aa, synthetic construct
AQWRGDVRTL

SEQ ID NO: 142934 - protein, 10 aa, synthetic construct
AQFRGDVRTL

SEQ ID NO: 142935 - protein, 10 aa, synthetic construct
AQKRGDVRTL

SEQ ID NO: 142936 - protein, 10 aa, synthetic construct
AQRRGDVRTL

SEQ ID NO: 142937 - protein, 10 aa, synthetic construct
AQHRGDVRTL

SEQ ID NO: 142938 - protein, 10 aa, synthetic construct
AQSRGDVRTL

SEQ ID NO: 142939 - protein, 10 aa, synthetic construct
AQTRGDVRTL

SEQ ID NO: 142940 - protein, 10 aa, synthetic construct
AQYRGDVRTL

SEQ ID NO: 142941 - protein, 10 aa, synthetic construct
AQNRGDVRTL

SEQ ID NO: 142942 - protein, 10 aa, synthetic construct
AQQRGDVRTL

SEQ ID NO: 142943 - protein, 10 aa, synthetic construct
AQDRGDVRTL

SEQ ID NO: 142944 - protein, 10 aa, synthetic construct
AQERGDVRTL

SEQ ID NO: 142945 - protein, 10 aa, synthetic construct
ADGRGDVRTL

SEQ ID NO: 142946 - protein, 10 aa, synthetic construct
ADARGDVRTL

SEQ ID NO: 142947 - protein, 10 aa, synthetic construct
ADVRGDVRTL

SEQ ID NO: 142948 - protein, 10 aa, synthetic construct
ADPRGDVRTL

SEQ ID NO: 142949 - protein, 10 aa, synthetic construct
ADLRGDVRTL

SEQ ID NO: 142950 - protein, 10 aa, synthetic construct
ADIRGDVRTL

SEQ ID NO: 142951 - protein, 10 aa, synthetic construct
ADMRGDVRTL

SEQ ID NO: 142952 - protein, 10 aa, synthetic construct
ADWRGDVRTL

SEQ ID NO: 142953 - protein, 10 aa, synthetic construct
ADFRGDVRTL

SEQ ID NO: 142954 - protein, 10 aa, synthetic construct
ADKRGDVRTL

SEQ ID NO: 142955 - protein, 10 aa, synthetic construct
ADRRGDVRTL

SEQ ID NO: 142956 - protein, 10 aa, synthetic construct
ADHRGDVRTL

SEQ ID NO: 142957 - protein, 10 aa, synthetic construct
ADSRGDVRTL

SEQ ID NO: 142958 - protein, 10 aa, synthetic construct
ADTRGDVRTL

SEQ ID NO: 142959 - protein, 10 aa, synthetic construct
ADYRGDVRTL

SEQ ID NO: 142960 - protein, 10 aa, synthetic construct
ADNRGDVRTL

SEQ ID NO: 142961 - protein, 10 aa, synthetic construct
ADQRGDVRTL

SEQ ID NO: 142962 - protein, 10 aa, synthetic construct
ADDRGDVRTL

SEQ ID NO: 142963 - protein, 10 aa, synthetic construct
ADERGDVRTL

SEQ ID NO: 142964 - protein, 10 aa, synthetic construct
AEGRGDVRTL

SEQ ID NO: 142965 - protein, 10 aa, synthetic construct
AEARGDVRTL

SEQ ID NO: 142966 - protein, 10 aa, synthetic construct
AEVRGDVRTL

SEQ ID NO: 142967 - protein, 10 aa, synthetic construct
AEPRGDVRTL

SEQ ID NO: 142968 - protein, 10 aa, synthetic construct
AELRGDVRTL

SEQ ID NO: 142969 - protein, 10 aa, synthetic construct
AEIRGDVRTL

SEQ ID NO: 142970 - protein, 10 aa, synthetic construct
AEMRGDVRTL

SEQ ID NO: 142971 - protein, 10 aa, synthetic construct
AEWRGDVRTL

SEQ ID NO: 142972 - protein, 10 aa, synthetic construct
AEFRGDVRTL

SEQ ID NO: 142973 - protein, 10 aa, synthetic construct
AEKRGDVRTL

SEQ ID NO: 142974 - protein, 10 aa, synthetic construct
AERRGDVRTL

SEQ ID NO: 142975 - protein, 10 aa, synthetic construct
AEHRGDVRTL

SEQ ID NO: 142976 - protein, 10 aa, synthetic construct
AESRGDVRTL

SEQ ID NO: 142977 - protein, 10 aa, synthetic construct
AETRGDVRTL

SEQ ID NO: 142978 - protein, 10 aa, synthetic construct
AEYRGDVRTL

SEQ ID NO: 142979 - protein, 10 aa, synthetic construct
AENRGDVRTL

SEQ ID NO: 142980 - protein, 10 aa, synthetic construct
AEQRGDVRTL

SEQ ID NO: 142981 - protein, 10 aa, synthetic construct
AEDRGDVRTL

SEQ ID NO: 142982 - protein, 10 aa, synthetic construct
AEERGDVRTL

SEQ ID NO: 142983 - protein, 10 aa, synthetic construct
EGGRGDVRTL

SEQ ID NO: 142984 - protein, 10 aa, synthetic construct
EGARGDVRTL

SEQ ID NO: 142985 - protein, 10 aa, synthetic construct
EGVRGDVRTL

SEQ ID NO: 142986 - protein, 10 aa, synthetic construct
EGPRGDVRTL

SEQ ID NO: 142987 - protein, 10 aa, synthetic construct
EGLRGDVRTL

SEQ ID NO: 142988 - protein, 10 aa, synthetic construct
EGIRGDVRTL

SEQ ID NO: 142989 - protein, 10 aa, synthetic construct
EGMRGDVRTL

SEQ ID NO: 142990 - protein, 10 aa, synthetic construct
EGWRGDVRTL

SEQ ID NO: 142991 - protein, 10 aa, synthetic construct
EGFRGDVRTL

SEQ ID NO: 142992 - protein, 10 aa, synthetic construct
EGKRGDVRTL

SEQ ID NO: 142993 - protein, 10 aa, synthetic construct
EGRRGDVRTL

SEQ ID NO: 142994 - protein, 10 aa, synthetic construct
EGHRGDVRTL

SEQ ID NO: 142995 - protein, 10 aa, synthetic construct
EGSRGDVRTL

SEQ ID NO: 142996 - protein, 10 aa, synthetic construct
EGTRGDVRTL

SEQ ID NO: 142997 - protein, 10 aa, synthetic construct
EGYRGDVRTL

SEQ ID NO: 142998 - protein, 10 aa, synthetic construct
EGNRGDVRTL

SEQ ID NO: 142999 - protein, 10 aa, synthetic construct
EGQRGDVRTL

SEQ ID NO: 143000 - protein, 10 aa, synthetic construct
EGDRGDVRTL

SEQ ID NO: 143001 - protein, 10 aa, synthetic construct
EGERGDVRTL

SEQ ID NO: 143002 - protein, 10 aa, synthetic construct
EAGRGDVRTL

SEQ ID NO: 143003 - protein, 10 aa, synthetic construct
EAARGDVRTL

SEQ ID NO: 143004 - protein, 10 aa, synthetic construct
EAVRGDVRTL

SEQ ID NO: 143005 - protein, 10 aa, synthetic construct
EAPRGDVRTL

SEQ ID NO: 143006 - protein, 10 aa, synthetic construct
EALRGDVRTL

SEQ ID NO: 143007 - protein, 10 aa, synthetic construct
EAIRGDVRTL

SEQ ID NO: 143008 - protein, 10 aa, synthetic construct
EAMRGDVRTL

SEQ ID NO: 143009 - protein, 10 aa, synthetic construct
EAWRGDVRTL

SEQ ID NO: 143010 - protein, 10 aa, synthetic construct
EAFRGDVRTL

SEQ ID NO: 143011 - protein, 10 aa, synthetic construct
EAKRGDVRTL

SEQ ID NO: 143012 - protein, 10 aa, synthetic construct
EARRGDVRTL

SEQ ID NO: 143013 - protein, 10 aa, synthetic construct
EAHRGDVRTL

SEQ ID NO: 143014 - protein, 10 aa, synthetic construct
EASRGDVRTL

SEQ ID NO: 143015 - protein, 10 aa, synthetic construct
EATRGDVRTL

SEQ ID NO: 143016 - protein, 10 aa, synthetic construct
EAYRGDVRTL

SEQ ID NO: 143017 - protein, 10 aa, synthetic construct
EANRGDVRTL

SEQ ID NO: 143018 - protein, 10 aa, synthetic construct
EAQRGDVRTL

SEQ ID NO: 143019 - protein, 10 aa, synthetic construct
EADRGDVRTL

SEQ ID NO: 143020 - protein, 10 aa, synthetic construct
EAERGDVRTL

SEQ ID NO: 143021 - protein, 10 aa, synthetic construct
EVGRGDVRTL

SEQ ID NO: 143022 - protein, 10 aa, synthetic construct
EVARGDVRTL

SEQ ID NO: 143023 - protein, 10 aa, synthetic construct
EVVRGDVRTL

SEQ ID NO: 143024 - protein, 10 aa, synthetic construct
EVPRGDVRTL

SEQ ID NO: 143025 - protein, 10 aa, synthetic construct
EVLRGDVRTL

SEQ ID NO: 143026 - protein, 10 aa, synthetic construct
EVIRGDVRTL

SEQ ID NO: 143027 - protein, 10 aa, synthetic construct
EVMRGDVRTL

SEQ ID NO: 143028 - protein, 10 aa, synthetic construct
EVWRGDVRTL

SEQ ID NO: 143029 - protein, 10 aa, synthetic construct
EVFRGDVRTL

SEQ ID NO: 143030 - protein, 10 aa, synthetic construct
EVKRGDVRTL

SEQ ID NO: 143031 - protein, 10 aa, synthetic construct
EVRRGDVRTL

SEQ ID NO: 143032 - protein, 10 aa, synthetic construct
EVHRGDVRTL

SEQ ID NO: 143033 - protein, 10 aa, synthetic construct
EVSRGDVRTL

SEQ ID NO: 143034 - protein, 10 aa, synthetic construct
EVTRGDVRTL

SEQ ID NO: 143035 - protein, 10 aa, synthetic construct
EVYRGDVRTL

SEQ ID NO: 143036 - protein, 10 aa, synthetic construct
EVNRGDVRTL

SEQ ID NO: 143037 - protein, 10 aa, synthetic construct
EVQRGDVRTL

SEQ ID NO: 143038 - protein, 10 aa, synthetic construct
EVDRGDVRTL

SEQ ID NO: 143039 - protein, 10 aa, synthetic construct
EVERGDVRTL

SEQ ID NO: 143040 - protein, 10 aa, synthetic construct
EPGRGDVRTL

SEQ ID NO: 143041 - protein, 10 aa, synthetic construct
EPARGDVRTL

SEQ ID NO: 143042 - protein, 10 aa, synthetic construct
EPVRGDVRTL

SEQ ID NO: 143043 - protein, 10 aa, synthetic construct
EPPRGDVRTL

SEQ ID NO: 143044 - protein, 10 aa, synthetic construct
EPLRGDVRTL

SEQ ID NO: 143045 - protein, 10 aa, synthetic construct
EPIRGDVRTL

SEQ ID NO: 143046 - protein, 10 aa, synthetic construct
EPMRGDVRTL

SEQ ID NO: 143047 - protein, 10 aa, synthetic construct
EPWRGDVRTL

SEQ ID NO: 143048 - protein, 10 aa, synthetic construct
EPFRGDVRTL

SEQ ID NO: 143049 - protein, 10 aa, synthetic construct
EPKRGDVRTL

SEQ ID NO: 143050 - protein, 10 aa, synthetic construct
EPRRGDVRTL

SEQ ID NO: 143051 - protein, 10 aa, synthetic construct
EPHRGDVRTL

SEQ ID NO: 143052 - protein, 10 aa, synthetic construct
EPSRGDVRTL

SEQ ID NO: 143053 - protein, 10 aa, synthetic construct
EPTRGDVRTL

SEQ ID NO: 143054 - protein, 10 aa, synthetic construct
EPYRGDVRTL

SEQ ID NO: 143055 - protein, 10 aa, synthetic construct
EPNRGDVRTL

SEQ ID NO: 143056 - protein, 10 aa, synthetic construct
EPQRGDVRTL

SEQ ID NO: 143057 - protein, 10 aa, synthetic construct
EPDRGDVRTL

SEQ ID NO: 143058 - protein, 10 aa, synthetic construct
EPERGDVRTL

SEQ ID NO: 143059 - protein, 10 aa, synthetic construct
ELGRGDVRTL

SEQ ID NO: 143060 - protein, 10 aa, synthetic construct
ELARGDVRTL

SEQ ID NO: 143061 - protein, 10 aa, synthetic construct
ELVRGDVRTL

SEQ ID NO: 143062 - protein, 10 aa, synthetic construct
ELPRGDVRTL

SEQ ID NO: 143063 - protein, 10 aa, synthetic construct
ELLRGDVRTL

SEQ ID NO: 143064 - protein, 10 aa, synthetic construct
ELIRGDVRTL

SEQ ID NO: 143065 - protein, 10 aa, synthetic construct
ELMRGDVRTL

SEQ ID NO: 143066 - protein, 10 aa, synthetic construct
ELWRGDVRTL

SEQ ID NO: 143067 - protein, 10 aa, synthetic construct
ELFRGDVRTL

SEQ ID NO: 143068 - protein, 10 aa, synthetic construct
ELKRGDVRTL

SEQ ID NO: 143069 - protein, 10 aa, synthetic construct
ELRRGDVRTL

SEQ ID NO: 143070 - protein, 10 aa, synthetic construct
ELHRGDVRTL

SEQ ID NO: 143071 - protein, 10 aa, synthetic construct
ELSRGDVRTL

SEQ ID NO: 143072 - protein, 10 aa, synthetic construct
ELTRGDVRTL

SEQ ID NO: 143073 - protein, 10 aa, synthetic construct
ELYRGDVRTL

SEQ ID NO: 143074 - protein, 10 aa, synthetic construct
ELNRGDVRTL

SEQ ID NO: 143075 - protein, 10 aa, synthetic construct
ELQRGDVRTL

SEQ ID NO: 143076 - protein, 10 aa, synthetic construct
ELDRGDVRTL

SEQ ID NO: 143077 - protein, 10 aa, synthetic construct
ELERGDVRTL

SEQ ID NO: 143078 - protein, 10 aa, synthetic construct
EIGRGDVRTL

SEQ ID NO: 143079 - protein, 10 aa, synthetic construct
EIARGDVRTL

SEQ ID NO: 143080 - protein, 10 aa, synthetic construct
EIVRGDVRTL

SEQ ID NO: 143081 - protein, 10 aa, synthetic construct
EIPRGDVRTL

SEQ ID NO: 143082 - protein, 10 aa, synthetic construct
EILRGDVRTL

SEQ ID NO: 143083 - protein, 10 aa, synthetic construct
EIIRGDVRTL

SEQ ID NO: 143084 - protein, 10 aa, synthetic construct
EIMRGDVRTL

SEQ ID NO: 143085 - protein, 10 aa, synthetic construct
EIWRGDVRTL

SEQ ID NO: 143086 - protein, 10 aa, synthetic construct
EIFRGDVRTL

SEQ ID NO: 143087 - protein, 10 aa, synthetic construct
EIKRGDVRTL

SEQ ID NO: 143088 - protein, 10 aa, synthetic construct
EIRRGDVRTL

SEQ ID NO: 143089 - protein, 10 aa, synthetic construct
EIHRGDVRTL

SEQ ID NO: 143090 - protein, 10 aa, synthetic construct
EISRGDVRTL

SEQ ID NO: 143091 - protein, 10 aa, synthetic construct
EITRGDVRTL

SEQ ID NO: 143092 - protein, 10 aa, synthetic construct
EIYRGDVRTL

SEQ ID NO: 143093 - protein, 10 aa, synthetic construct
EINRGDVRTL

SEQ ID NO: 143094 - protein, 10 aa, synthetic construct
EIQRGDVRTL

SEQ ID NO: 143095 - protein, 10 aa, synthetic construct
EIDRGDVRTL

SEQ ID NO: 143096 - protein, 10 aa, synthetic construct
EIERGDVRTL

SEQ ID NO: 143097 - protein, 10 aa, synthetic construct
EMGRGDVRTL

SEQ ID NO: 143098 - protein, 10 aa, synthetic construct
EMARGDVRTL

SEQ ID NO: 143099 - protein, 10 aa, synthetic construct
EMVRGDVRTL

SEQ ID NO: 143100 - protein, 10 aa, synthetic construct
EMPRGDVRTL

SEQ ID NO: 143101 - protein, 10 aa, synthetic construct
EMLRGDVRTL

SEQ ID NO: 143102 - protein, 10 aa, synthetic construct
EMIRGDVRTL

SEQ ID NO: 143103 - protein, 10 aa, synthetic construct
EMMRGDVRTL

SEQ ID NO: 143104 - protein, 10 aa, synthetic construct
EMWRGDVRTL

SEQ ID NO: 143105 - protein, 10 aa, synthetic construct
EMFRGDVRTL

SEQ ID NO: 143106 - protein, 10 aa, synthetic construct
EMKRGDVRTL

SEQ ID NO: 143107 - protein, 10 aa, synthetic construct
EMRRGDVRTL

SEQ ID NO: 143108 - protein, 10 aa, synthetic construct
EMHRGDVRTL

SEQ ID NO: 143109 - protein, 10 aa, synthetic construct
EMSRGDVRTL

SEQ ID NO: 143110 - protein, 10 aa, synthetic construct
EMTRGDVRTL

SEQ ID NO: 143111 - protein, 10 aa, synthetic construct
EMYRGDVRTL

SEQ ID NO: 143112 - protein, 10 aa, synthetic construct
EMNRGDVRTL

SEQ ID NO: 143113 - protein, 10 aa, synthetic construct
EMQRGDVRTL

SEQ ID NO: 143114 - protein, 10 aa, synthetic construct
EMDRGDVRTL

SEQ ID NO: 143115 - protein, 10 aa, synthetic construct
EMERGDVRTL

SEQ ID NO: 143116 - protein, 10 aa, synthetic construct
EWGRGDVRTL

SEQ ID NO: 143117 - protein, 10 aa, synthetic construct
EWARGDVRTL

SEQ ID NO: 143118 - protein, 10 aa, synthetic construct
EWVRGDVRTL

SEQ ID NO: 143119 - protein, 10 aa, synthetic construct
EWPRGDVRTL

SEQ ID NO: 143120 - protein, 10 aa, synthetic construct
EWLRGDVRTL

SEQ ID NO: 143121 - protein, 10 aa, synthetic construct
EWIRGDVRTL

SEQ ID NO: 143122 - protein, 10 aa, synthetic construct
EWMRGDVRTL

SEQ ID NO: 143123 - protein, 10 aa, synthetic construct
EWWRGDVRTL

SEQ ID NO: 143124 - protein, 10 aa, synthetic construct
EWFRGDVRTL

SEQ ID NO: 143125 - protein, 10 aa, synthetic construct
EWKRGDVRTL

SEQ ID NO: 143126 - protein, 10 aa, synthetic construct
EWRRGDVRTL

SEQ ID NO: 143127 - protein, 10 aa, synthetic construct
EWHRGDVRTL

SEQ ID NO: 143128 - protein, 10 aa, synthetic construct
EWSRGDVRTL

SEQ ID NO: 143129 - protein, 10 aa, synthetic construct
EWTRGDVRTL

SEQ ID NO: 143130 - protein, 10 aa, synthetic construct
EWYRGDVRTL

SEQ ID NO: 143131 - protein, 10 aa, synthetic construct
EWNRGDVRTL

SEQ ID NO: 143132 - protein, 10 aa, synthetic construct
EWQRGDVRTL

SEQ ID NO: 143133 - protein, 10 aa, synthetic construct
EWDRGDVRTL

SEQ ID NO: 143134 - protein, 10 aa, synthetic construct
EWERGDVRTL

SEQ ID NO: 143135 - protein, 10 aa, synthetic construct
EFGRGDVRTL

SEQ ID NO: 143136 - protein, 10 aa, synthetic construct
EFARGDVRTL

SEQ ID NO: 143137 - protein, 10 aa, synthetic construct
EFVRGDVRTL

SEQ ID NO: 143138 - protein, 10 aa, synthetic construct
EFPRGDVRTL

SEQ ID NO: 143139 - protein, 10 aa, synthetic construct
EFLRGDVRTL

SEQ ID NO: 143140 - protein, 10 aa, synthetic construct
EFIRGDVRTL

SEQ ID NO: 143141 - protein, 10 aa, synthetic construct
EFMRGDVRTL

SEQ ID NO: 143142 - protein, 10 aa, synthetic construct
EFWRGDVRTL

SEQ ID NO: 143143 - protein, 10 aa, synthetic construct
EFFRGDVRTL

SEQ ID NO: 143144 - protein, 10 aa, synthetic construct
EFKRGDVRTL

SEQ ID NO: 143145 - protein, 10 aa, synthetic construct
EFRRGDVRTL

SEQ ID NO: 143146 - protein, 10 aa, synthetic construct
EFHRGDVRTL

SEQ ID NO: 143147 - protein, 10 aa, synthetic construct
EFSRGDVRTL

SEQ ID NO: 143148 - protein, 10 aa, synthetic construct
EFTRGDVRTL

SEQ ID NO: 143149 - protein, 10 aa, synthetic construct
EFYRGDVRTL

SEQ ID NO: 143150 - protein, 10 aa, synthetic construct
EFNRGDVRTL

SEQ ID NO: 143151 - protein, 10 aa, synthetic construct
EFQRGDVRTL

SEQ ID NO: 143152 - protein, 10 aa, synthetic construct
EFDRGDVRTL

SEQ ID NO: 143153 - protein, 10 aa, synthetic construct
EFERGDVRTL

SEQ ID NO: 143154 - protein, 10 aa, synthetic construct
EKGRGDVRTL

SEQ ID NO: 143155 - protein, 10 aa, synthetic construct
EKARGDVRTL

SEQ ID NO: 143156 - protein, 10 aa, synthetic construct
EKVRGDVRTL

SEQ ID NO: 143157 - protein, 10 aa, synthetic construct
EKPRGDVRTL

SEQ ID NO: 143158 - protein, 10 aa, synthetic construct
EKLRGDVRTL

SEQ ID NO: 143159 - protein, 10 aa, synthetic construct
EKIRGDVRTL

SEQ ID NO: 143160 - protein, 10 aa, synthetic construct
EKMRGDVRTL

SEQ ID NO: 143161 - protein, 10 aa, synthetic construct
EKWRGDVRTL

SEQ ID NO: 143162 - protein, 10 aa, synthetic construct
EKFRGDVRTL

SEQ ID NO: 143163 - protein, 10 aa, synthetic construct
EKKRGDVRTL

SEQ ID NO: 143164 - protein, 10 aa, synthetic construct
EKRRGDVRTL

SEQ ID NO: 143165 - protein, 10 aa, synthetic construct
EKHRGDVRTL

SEQ ID NO: 143166 - protein, 10 aa, synthetic construct
EKSRGDVRTL

SEQ ID NO: 143167 - protein, 10 aa, synthetic construct
EKTRGDVRTL

SEQ ID NO: 143168 - protein, 10 aa, synthetic construct
EKYRGDVRTL

SEQ ID NO: 143169 - protein, 10 aa, synthetic construct
EKNRGDVRTL

SEQ ID NO: 143170 - protein, 10 aa, synthetic construct
EKQRGDVRTL

SEQ ID NO: 143171 - protein, 10 aa, synthetic construct
EKDRGDVRTL

SEQ ID NO: 143172 - protein, 10 aa, synthetic construct
EKERGDVRTL

SEQ ID NO: 143173 - protein, 10 aa, synthetic construct
ERGRGDVRTL

SEQ ID NO: 143174 - protein, 10 aa, synthetic construct
ERARGDVRTL

SEQ ID NO: 143175 - protein, 10 aa, synthetic construct
ERVRGDVRTL

SEQ ID NO: 143176 - protein, 10 aa, synthetic construct
ERPRGDVRTL

SEQ ID NO: 143177 - protein, 10 aa, synthetic construct
ERLRGDVRTL

SEQ ID NO: 143178 - protein, 10 aa, synthetic construct
ERIRGDVRTL

SEQ ID NO: 143179 - protein, 10 aa, synthetic construct
ERMRGDVRTL

SEQ ID NO: 143180 - protein, 10 aa, synthetic construct
ERWRGDVRTL

SEQ ID NO: 143181 - protein, 10 aa, synthetic construct
ERFRGDVRTL

SEQ ID NO: 143182 - protein, 10 aa, synthetic construct
ERKRGDVRTL

SEQ ID NO: 143183 - protein, 10 aa, synthetic construct
ERRRGDVRTL

SEQ ID NO: 143184 - protein, 10 aa, synthetic construct
ERHRGDVRTL

SEQ ID NO: 143185 - protein, 10 aa, synthetic construct
ERSRGDVRTL

SEQ ID NO: 143186 - protein, 10 aa, synthetic construct
ERTRGDVRTL

SEQ ID NO: 143187 - protein, 10 aa, synthetic construct
ERYRGDVRTL

SEQ ID NO: 143188 - protein, 10 aa, synthetic construct
ERNRGDVRTL

SEQ ID NO: 143189 - protein, 10 aa, synthetic construct
ERQRGDVRTL

SEQ ID NO: 143190 - protein, 10 aa, synthetic construct
ERDRGDVRTL

SEQ ID NO: 143191 - protein, 10 aa, synthetic construct
ERERGDVRTL

SEQ ID NO: 143192 - protein, 10 aa, synthetic construct
EHGRGDVRTL

SEQ ID NO: 143193 - protein, 10 aa, synthetic construct
EHARGDVRTL

SEQ ID NO: 143194 - protein, 10 aa, synthetic construct
EHVRGDVRTL

SEQ ID NO: 143195 - protein, 10 aa, synthetic construct
EHPRGDVRTL

SEQ ID NO: 143196 - protein, 10 aa, synthetic construct
EHLRGDVRTL

SEQ ID NO: 143197 - protein, 10 aa, synthetic construct
EHIRGDVRTL

SEQ ID NO: 143198 - protein, 10 aa, synthetic construct
EHMRGDVRTL

SEQ ID NO: 143199 - protein, 10 aa, synthetic construct
EHWRGDVRTL

SEQ ID NO: 143200 - protein, 10 aa, synthetic construct
EHFRGDVRTL

SEQ ID NO: 143201 - protein, 10 aa, synthetic construct
EHKRGDVRTL

SEQ ID NO: 143202 - protein, 10 aa, synthetic construct
EHRRGDVRTL

SEQ ID NO: 143203 - protein, 10 aa, synthetic construct
EHHRGDVRTL

SEQ ID NO: 143204 - protein, 10 aa, synthetic construct
EHSRGDVRTL

SEQ ID NO: 143205 - protein, 10 aa, synthetic construct
EHTRGDVRTL

SEQ ID NO: 143206 - protein, 10 aa, synthetic construct
EHYRGDVRTL

SEQ ID NO: 143207 - protein, 10 aa, synthetic construct
EHNRGDVRTL

SEQ ID NO: 143208 - protein, 10 aa, synthetic construct
EHQRGDVRTL

SEQ ID NO: 143209 - protein, 10 aa, synthetic construct
EHDRGDVRTL

SEQ ID NO: 143210 - protein, 10 aa, synthetic construct
EHERGDVRTL

SEQ ID NO: 143211 - protein, 10 aa, synthetic construct
ESGRGDVRTL

SEQ ID NO: 143212 - protein, 10 aa, synthetic construct
ESARGDVRTL

SEQ ID NO: 143213 - protein, 10 aa, synthetic construct
ESVRGDVRTL

SEQ ID NO: 143214 - protein, 10 aa, synthetic construct
ESPRGDVRTL

SEQ ID NO: 143215 - protein, 10 aa, synthetic construct
ESLRGDVRTL

SEQ ID NO: 143216 - protein, 10 aa, synthetic construct
ESIRGDVRTL

SEQ ID NO: 143217 - protein, 10 aa, synthetic construct
ESMRGDVRTL

SEQ ID NO: 143218 - protein, 10 aa, synthetic construct
ESWRGDVRTL

SEQ ID NO: 143219 - protein, 10 aa, synthetic construct
ESFRGDVRTL

SEQ ID NO: 143220 - protein, 10 aa, synthetic construct
ESKRGDVRTL

SEQ ID NO: 143221 - protein, 10 aa, synthetic construct
ESRRGDVRTL

SEQ ID NO: 143222 - protein, 10 aa, synthetic construct
ESHRGDVRTL

SEQ ID NO: 143223 - protein, 10 aa, synthetic construct
ESSRGDVRTL

SEQ ID NO: 143224 - protein, 10 aa, synthetic construct
ESTRGDVRTL

SEQ ID NO: 143225 - protein, 10 aa, synthetic construct
ESYRGDVRTL

SEQ ID NO: 143226 - protein, 10 aa, synthetic construct
ESNRGDVRTL

SEQ ID NO: 143227 - protein, 10 aa, synthetic construct
ESQRGDVRTL

SEQ ID NO: 143228 - protein, 10 aa, synthetic construct
ESDRGDVRTL

SEQ ID NO: 143229 - protein, 10 aa, synthetic construct
ESERGDVRTL

SEQ ID NO: 143230 - protein, 10 aa, synthetic construct
ETGRGDVRTL

SEQ ID NO: 143231 - protein, 10 aa, synthetic construct
ETARGDVRTL

SEQ ID NO: 143232 - protein, 10 aa, synthetic construct
ETVRGDVRTL

SEQ ID NO: 143233 - protein, 10 aa, synthetic construct
ETPRGDVRTL

SEQ ID NO: 143234 - protein, 10 aa, synthetic construct
ETLRGDVRTL

SEQ ID NO: 143235 - protein, 10 aa, synthetic construct
ETIRGDVRTL

SEQ ID NO: 143236 - protein, 10 aa, synthetic construct
ETMRGDVRTL

SEQ ID NO: 143237 - protein, 10 aa, synthetic construct
ETWRGDVRTL

SEQ ID NO: 143238 - protein, 10 aa, synthetic construct
ETFRGDVRTL

SEQ ID NO: 143239 - protein, 10 aa, synthetic construct
ETKRGDVRTL

SEQ ID NO: 143240 - protein, 10 aa, synthetic construct
ETRRGDVRTL

SEQ ID NO: 143241 - protein, 10 aa, synthetic construct
ETHRGDVRTL

SEQ ID NO: 143242 - protein, 10 aa, synthetic construct
ETSRGDVRTL

SEQ ID NO: 143243 - protein, 10 aa, synthetic construct
ETTRGDVRTL

SEQ ID NO: 143244 - protein, 10 aa, synthetic construct
ETYRGDVRTL

SEQ ID NO: 143245 - protein, 10 aa, synthetic construct
ETNRGDVRTL

SEQ ID NO: 143246 - protein, 10 aa, synthetic construct
ETQRGDVRTL

SEQ ID NO: 143247 - protein, 10 aa, synthetic construct
ETDRGDVRTL

SEQ ID NO: 143248 - protein, 10 aa, synthetic construct
ETERGDVRTL

SEQ ID NO: 143249 - protein, 10 aa, synthetic construct
EYGRGDVRTL

SEQ ID NO: 143250 - protein, 10 aa, synthetic construct
EYARGDVRTL

SEQ ID NO: 143251 - protein, 10 aa, synthetic construct
EYVRGDVRTL

SEQ ID NO: 143252 - protein, 10 aa, synthetic construct
EYPRGDVRTL

SEQ ID NO: 143253 - protein, 10 aa, synthetic construct
EYLRGDVRTL

SEQ ID NO: 143254 - protein, 10 aa, synthetic construct
EYIRGDVRTL

SEQ ID NO: 143255 - protein, 10 aa, synthetic construct
EYMRGDVRTL

SEQ ID NO: 143256 - protein, 10 aa, synthetic construct
EYWRGDVRTL

SEQ ID NO: 143257 - protein, 10 aa, synthetic construct
EYFRGDVRTL

SEQ ID NO: 143258 - protein, 10 aa, synthetic construct
EYKRGDVRTL

SEQ ID NO: 143259 - protein, 10 aa, synthetic construct
EYRRGDVRTL

SEQ ID NO: 143260 - protein, 10 aa, synthetic construct
EYHRGDVRTL

SEQ ID NO: 143261 - protein, 10 aa, synthetic construct
EYSRGDVRTL

SEQ ID NO: 143262 - protein, 10 aa, synthetic construct
EYTRGDVRTL

SEQ ID NO: 143263 - protein, 10 aa, synthetic construct
EYYRGDVRTL

SEQ ID NO: 143264 - protein, 10 aa, synthetic construct
EYNRGDVRTL

SEQ ID NO: 143265 - protein, 10 aa, synthetic construct
EYQRGDVRTL

SEQ ID NO: 143266 - protein, 10 aa, synthetic construct
EYDRGDVRTL

SEQ ID NO: 143267 - protein, 10 aa, synthetic construct
EYERGDVRTL

SEQ ID NO: 143268 - protein, 10 aa, synthetic construct
ENGRGDVRTL

SEQ ID NO: 143269 - protein, 10 aa, synthetic construct
ENARGDVRTL

SEQ ID NO: 143270 - protein, 10 aa, synthetic construct
ENVRGDVRTL

SEQ ID NO: 143271 - protein, 10 aa, synthetic construct
ENPRGDVRTL

SEQ ID NO: 143272 - protein, 10 aa, synthetic construct
ENLRGDVRTL

SEQ ID NO: 143273 - protein, 10 aa, synthetic construct
ENIRGDVRTL

SEQ ID NO: 143274 - protein, 10 aa, synthetic construct
ENMRGDVRTL

SEQ ID NO: 143275 - protein, 10 aa, synthetic construct
ENWRGDVRTL

SEQ ID NO: 143276 - protein, 10 aa, synthetic construct
ENFRGDVRTL

SEQ ID NO: 143277 - protein, 10 aa, synthetic construct
ENKRGDVRTL

SEQ ID NO: 143278 - protein, 10 aa, synthetic construct
ENRRGDVRTL

SEQ ID NO: 143279 - protein, 10 aa, synthetic construct
ENHRGDVRTL

SEQ ID NO: 143280 - protein, 10 aa, synthetic construct
ENSRGDVRTL

SEQ ID NO: 143281 - protein, 10 aa, synthetic construct
ENTRGDVRTL

SEQ ID NO: 143282 - protein, 10 aa, synthetic construct
ENYRGDVRTL

SEQ ID NO: 143283 - protein, 10 aa, synthetic construct
ENNRGDVRTL

SEQ ID NO: 143284 - protein, 10 aa, synthetic construct
ENQRGDVRTL

SEQ ID NO: 143285 - protein, 10 aa, synthetic construct
ENDRGDVRTL

SEQ ID NO: 143286 - protein, 10 aa, synthetic construct
ENERGDVRTL

SEQ ID NO: 143287 - protein, 10 aa, synthetic construct
EQGRGDVRTL

SEQ ID NO: 143288 - protein, 10 aa, synthetic construct
EQARGDVRTL

SEQ ID NO: 143289 - protein, 10 aa, synthetic construct
EQVRGDVRTL

SEQ ID NO: 143290 - protein, 10 aa, synthetic construct
EQPRGDVRTL

SEQ ID NO: 143291 - protein, 10 aa, synthetic construct
EQLRGDVRTL

SEQ ID NO: 143292 - protein, 10 aa, synthetic construct
EQIRGDVRTL

SEQ ID NO: 143293 - protein, 10 aa, synthetic construct
EQMRGDVRTL

SEQ ID NO: 143294 - protein, 10 aa, synthetic construct
EQWRGDVRTL

SEQ ID NO: 143295 - protein, 10 aa, synthetic construct
EQFRGDVRTL

SEQ ID NO: 143296 - protein, 10 aa, synthetic construct
EQKRGDVRTL

SEQ ID NO: 143297 - protein, 10 aa, synthetic construct
EQRRGDVRTL

SEQ ID NO: 143298 - protein, 10 aa, synthetic construct
EQHRGDVRTL

SEQ ID NO: 143299 - protein, 10 aa, synthetic construct
EQSRGDVRTL

SEQ ID NO: 143300 - protein, 10 aa, synthetic construct
EQTRGDVRTL

SEQ ID NO: 143301 - protein, 10 aa, synthetic construct
EQYRGDVRTL

SEQ ID NO: 143302 - protein, 10 aa, synthetic construct
EQNRGDVRTL

SEQ ID NO: 143303 - protein, 10 aa, synthetic construct
EQQRGDVRTL

SEQ ID NO: 143304 - protein, 10 aa, synthetic construct
EQDRGDVRTL

SEQ ID NO: 143305 - protein, 10 aa, synthetic construct
EQERGDVRTL

SEQ ID NO: 143306 - protein, 10 aa, synthetic construct
EDGRGDVRTL

SEQ ID NO: 143307 - protein, 10 aa, synthetic construct
EDARGDVRTL

SEQ ID NO: 143308 - protein, 10 aa, synthetic construct
EDVRGDVRTL

SEQ ID NO: 143309 - protein, 10 aa, synthetic construct
EDPRGDVRTL

SEQ ID NO: 143310 - protein, 10 aa, synthetic construct
EDLRGDVRTL

SEQ ID NO: 143311 - protein, 10 aa, synthetic construct
EDIRGDVRTL

SEQ ID NO: 143312 - protein, 10 aa, synthetic construct
EDMRGDVRTL

SEQ ID NO: 143313 - protein, 10 aa, synthetic construct
EDWRGDVRTL

SEQ ID NO: 143314 - protein, 10 aa, synthetic construct
EDFRGDVRTL

SEQ ID NO: 143315 - protein, 10 aa, synthetic construct
EDKRGDVRTL

SEQ ID NO: 143316 - protein, 10 aa, synthetic construct
EDRRGDVRTL

SEQ ID NO: 143317 - protein, 10 aa, synthetic construct
EDHRGDVRTL

SEQ ID NO: 143318 - protein, 10 aa, synthetic construct
EDSRGDVRTL

SEQ ID NO: 143319 - protein, 10 aa, synthetic construct
EDTRGDVRTL

SEQ ID NO: 143320 - protein, 10 aa, synthetic construct
EDYRGDVRTL

SEQ ID NO: 143321 - protein, 10 aa, synthetic construct
EDNRGDVRTL

SEQ ID NO: 143322 - protein, 10 aa, synthetic construct
EDQRGDVRTL

SEQ ID NO: 143323 - protein, 10 aa, synthetic construct
EDDRGDVRTL

SEQ ID NO: 143324 - protein, 10 aa, synthetic construct
EDERGDVRTL

SEQ ID NO: 143325 - protein, 10 aa, synthetic construct
EEGRGDVRTL

SEQ ID NO: 143326 - protein, 10 aa, synthetic construct
EEARGDVRTL

SEQ ID NO: 143327 - protein, 10 aa, synthetic construct
EEVRGDVRTL

SEQ ID NO: 143328 - protein, 10 aa, synthetic construct
EEPRGDVRTL

SEQ ID NO: 143329 - protein, 10 aa, synthetic construct
EELRGDVRTL

SEQ ID NO: 143330 - protein, 10 aa, synthetic construct
EEIRGDVRTL

SEQ ID NO: 143331 - protein, 10 aa, synthetic construct
EEMRGDVRTL

SEQ ID NO: 143332 - protein, 10 aa, synthetic construct
EEWRGDVRTL

SEQ ID NO: 143333 - protein, 10 aa, synthetic construct
EEFRGDVRTL

SEQ ID NO: 143334 - protein, 10 aa, synthetic construct
EEKRGDVRTL

SEQ ID NO: 143335 - protein, 10 aa, synthetic construct
EERRGDVRTL

SEQ ID NO: 143336 - protein, 10 aa, synthetic construct
EEHRGDVRTL

SEQ ID NO: 143337 - protein, 10 aa, synthetic construct
EESRGDVRTL

SEQ ID NO: 143338 - protein, 10 aa, synthetic construct
EETRGDVRTL

SEQ ID NO: 143339 - protein, 10 aa, synthetic construct
EEYRGDVRTL

SEQ ID NO: 143340 - protein, 10 aa, synthetic construct
EENRGDVRTL

SEQ ID NO: 143341 - protein, 10 aa, synthetic construct
EEQRGDVRTL

SEQ ID NO: 143342 - protein, 10 aa, synthetic construct
EEDRGDVRTL

SEQ ID NO: 143343 - protein, 10 aa, synthetic construct
EEERGDVRTL

SEQ ID NO: 143344 - protein, 10 aa, synthetic construct
NGGRGDVRTL

SEQ ID NO: 143345 - protein, 10 aa, synthetic construct
NGARGDVRTL

SEQ ID NO: 143346 - protein, 10 aa, synthetic construct
NGVRGDVRTL

SEQ ID NO: 143347 - protein, 10 aa, synthetic construct
NGPRGDVRTL

SEQ ID NO: 143348 - protein, 10 aa, synthetic construct
NGLRGDVRTL

SEQ ID NO: 143349 - protein, 10 aa, synthetic construct
NGIRGDVRTL

SEQ ID NO: 143350 - protein, 10 aa, synthetic construct
NGMRGDVRTL

SEQ ID NO: 143351 - protein, 10 aa, synthetic construct
NGWRGDVRTL

SEQ ID NO: 143352 - protein, 10 aa, synthetic construct
NGFRGDVRTL

SEQ ID NO: 143353 - protein, 10 aa, synthetic construct
NGKRGDVRTL

SEQ ID NO: 143354 - protein, 10 aa, synthetic construct
NGRRGDVRTL

SEQ ID NO: 143355 - protein, 10 aa, synthetic construct
NGHRGDVRTL

SEQ ID NO: 143356 - protein, 10 aa, synthetic construct
NGSRGDVRTL

SEQ ID NO: 143357 - protein, 10 aa, synthetic construct
NGTRGDVRTL

SEQ ID NO: 143358 - protein, 10 aa, synthetic construct
NGYRGDVRTL

SEQ ID NO: 143359 - protein, 10 aa, synthetic construct
NGNRGDVRTL

SEQ ID NO: 143360 - protein, 10 aa, synthetic construct
NGQRGDVRTL

SEQ ID NO: 143361 - protein, 10 aa, synthetic construct
NGDRGDVRTL

SEQ ID NO: 143362 - protein, 10 aa, synthetic construct
NGERGDVRTL

SEQ ID NO: 143363 - protein, 10 aa, synthetic construct
NAGRGDVRTL

SEQ ID NO: 143364 - protein, 10 aa, synthetic construct
NAARGDVRTL

SEQ ID NO: 143365 - protein, 10 aa, synthetic construct
NAVRGDVRTL

SEQ ID NO: 143366 - protein, 10 aa, synthetic construct
NAPRGDVRTL

SEQ ID NO: 143367 - protein, 10 aa, synthetic construct
NALRGDVRTL

SEQ ID NO: 143368 - protein, 10 aa, synthetic construct
NAIRGDVRTL

SEQ ID NO: 143369 - protein, 10 aa, synthetic construct
NAMRGDVRTL

SEQ ID NO: 143370 - protein, 10 aa, synthetic construct
NAWRGDVRTL

SEQ ID NO: 143371 - protein, 10 aa, synthetic construct
NAFRGDVRTL

SEQ ID NO: 143372 - protein, 10 aa, synthetic construct
NAKRGDVRTL

SEQ ID NO: 143373 - protein, 10 aa, synthetic construct
NARRGDVRTL

SEQ ID NO: 143374 - protein, 10 aa, synthetic construct
NAHRGDVRTL

SEQ ID NO: 143375 - protein, 10 aa, synthetic construct
NASRGDVRTL

SEQ ID NO: 143376 - protein, 10 aa, synthetic construct
NATRGDVRTL

SEQ ID NO: 143377 - protein, 10 aa, synthetic construct
NAYRGDVRTL

SEQ ID NO: 143378 - protein, 10 aa, synthetic construct
NANRGDVRTL

SEQ ID NO: 143379 - protein, 10 aa, synthetic construct
NAQRGDVRTL

SEQ ID NO: 143380 - protein, 10 aa, synthetic construct
NADRGDVRTL

SEQ ID NO: 143381 - protein, 10 aa, synthetic construct
NAERGDVRTL

SEQ ID NO: 143382 - protein, 10 aa, synthetic construct
NVGRGDVRTL

SEQ ID NO: 143383 - protein, 10 aa, synthetic construct
NVARGDVRTL

SEQ ID NO: 143384 - protein, 10 aa, synthetic construct
NVVRGDVRTL

SEQ ID NO: 143385 - protein, 10 aa, synthetic construct
NVPRGDVRTL

SEQ ID NO: 143386 - protein, 10 aa, synthetic construct
NVLRGDVRTL

SEQ ID NO: 143387 - protein, 10 aa, synthetic construct
NVIRGDVRTL

SEQ ID NO: 143388 - protein, 10 aa, synthetic construct
NVMRGDVRTL

SEQ ID NO: 143389 - protein, 10 aa, synthetic construct
NVWRGDVRTL

SEQ ID NO: 143390 - protein, 10 aa, synthetic construct
NVFRGDVRTL

SEQ ID NO: 143391 - protein, 10 aa, synthetic construct
NVKRGDVRTL

SEQ ID NO: 143392 - protein, 10 aa, synthetic construct
NVRRGDVRTL

SEQ ID NO: 143393 - protein, 10 aa, synthetic construct
NVHRGDVRTL

SEQ ID NO: 143394 - protein, 10 aa, synthetic construct
NVSRGDVRTL

SEQ ID NO: 143395 - protein, 10 aa, synthetic construct
NVTRGDVRTL

SEQ ID NO: 143396 - protein, 10 aa, synthetic construct
NVYRGDVRTL

SEQ ID NO: 143397 - protein, 10 aa, synthetic construct
NVNRGDVRTL

SEQ ID NO: 143398 - protein, 10 aa, synthetic construct
NVQRGDVRTL

SEQ ID NO: 143399 - protein, 10 aa, synthetic construct
NVDRGDVRTL

SEQ ID NO: 143400 - protein, 10 aa, synthetic construct
NVERGDVRTL

SEQ ID NO: 143401 - protein, 10 aa, synthetic construct
NPGRGDVRTL

SEQ ID NO: 143402 - protein, 10 aa, synthetic construct
NPARGDVRTL

SEQ ID NO: 143403 - protein, 10 aa, synthetic construct
NPVRGDVRTL

SEQ ID NO: 143404 - protein, 10 aa, synthetic construct
NPPRGDVRTL

SEQ ID NO: 143405 - protein, 10 aa, synthetic construct
NPLRGDVRTL

SEQ ID NO: 143406 - protein, 10 aa, synthetic construct
NPIRGDVRTL

SEQ ID NO: 143407 - protein, 10 aa, synthetic construct
NPMRGDVRTL

SEQ ID NO: 143408 - protein, 10 aa, synthetic construct
NPWRGDVRTL

SEQ ID NO: 143409 - protein, 10 aa, synthetic construct
NPFRGDVRTL

SEQ ID NO: 143410 - protein, 10 aa, synthetic construct
NPKRGDVRTL

SEQ ID NO: 143411 - protein, 10 aa, synthetic construct
NPRRGDVRTL

SEQ ID NO: 143412 - protein, 10 aa, synthetic construct
NPHRGDVRTL

SEQ ID NO: 143413 - protein, 10 aa, synthetic construct
NPSRGDVRTL

SEQ ID NO: 143414 - protein, 10 aa, synthetic construct
NPTRGDVRTL

SEQ ID NO: 143415 - protein, 10 aa, synthetic construct
NPYRGDVRTL

SEQ ID NO: 143416 - protein, 10 aa, synthetic construct
NPNRGDVRTL

SEQ ID NO: 143417 - protein, 10 aa, synthetic construct
NPQRGDVRTL

SEQ ID NO: 143418 - protein, 10 aa, synthetic construct
NPDRGDVRTL

SEQ ID NO: 143419 - protein, 10 aa, synthetic construct
NPERGDVRTL

SEQ ID NO: 143420 - protein, 10 aa, synthetic construct
NLGRGDVRTL

SEQ ID NO: 143421 - protein, 10 aa, synthetic construct
NLARGDVRTL

SEQ ID NO: 143422 - protein, 10 aa, synthetic construct
NLVRGDVRTL

SEQ ID NO: 143423 - protein, 10 aa, synthetic construct
NLPRGDVRTL

SEQ ID NO: 143424 - protein, 10 aa, synthetic construct
NLLRGDVRTL

SEQ ID NO: 143425 - protein, 10 aa, synthetic construct
NLIRGDVRTL

SEQ ID NO: 143426 - protein, 10 aa, synthetic construct
NLMRGDVRTL

SEQ ID NO: 143427 - protein, 10 aa, synthetic construct
NLWRGDVRTL

SEQ ID NO: 143428 - protein, 10 aa, synthetic construct
NLFRGDVRTL

SEQ ID NO: 143429 - protein, 10 aa, synthetic construct
NLKRGDVRTL

SEQ ID NO: 143430 - protein, 10 aa, synthetic construct
NLRRGDVRTL

SEQ ID NO: 143431 - protein, 10 aa, synthetic construct
NLHRGDVRTL

SEQ ID NO: 143432 - protein, 10 aa, synthetic construct
NLSRGDVRTL

SEQ ID NO: 143433 - protein, 10 aa, synthetic construct
NLTRGDVRTL

SEQ ID NO: 143434 - protein, 10 aa, synthetic construct
NLYRGDVRTL

SEQ ID NO: 143435 - protein, 10 aa, synthetic construct
NLNRGDVRTL

SEQ ID NO: 143436 - protein, 10 aa, synthetic construct
NLQRGDVRTL

SEQ ID NO: 143437 - protein, 10 aa, synthetic construct
NLDRGDVRTL

SEQ ID NO: 143438 - protein, 10 aa, synthetic construct
NLERGDVRTL

SEQ ID NO: 143439 - protein, 10 aa, synthetic construct
NIGRGDVRTL

SEQ ID NO: 143440 - protein, 10 aa, synthetic construct
NIARGDVRTL

SEQ ID NO: 143441 - protein, 10 aa, synthetic construct
NIVRGDVRTL

SEQ ID NO: 143442 - protein, 10 aa, synthetic construct
NIPRGDVRTL

SEQ ID NO: 143443 - protein, 10 aa, synthetic construct
NILRGDVRTL

SEQ ID NO: 143444 - protein, 10 aa, synthetic construct
NIIRGDVRTL

SEQ ID NO: 143445 - protein, 10 aa, synthetic construct
NIMRGDVRTL

SEQ ID NO: 143446 - protein, 10 aa, synthetic construct
NIWRGDVRTL

SEQ ID NO: 143447 - protein, 10 aa, synthetic construct
NIFRGDVRTL

SEQ ID NO: 143448 - protein, 10 aa, synthetic construct
NIKRGDVRTL

SEQ ID NO: 143449 - protein, 10 aa, synthetic construct
NIRRGDVRTL

SEQ ID NO: 143450 - protein, 10 aa, synthetic construct
NIHRGDVRTL

SEQ ID NO: 143451 - protein, 10 aa, synthetic construct
NISRGDVRTL

SEQ ID NO: 143452 - protein, 10 aa, synthetic construct
NITRGDVRTL

SEQ ID NO: 143453 - protein, 10 aa, synthetic construct
NIYRGDVRTL

SEQ ID NO: 143454 - protein, 10 aa, synthetic construct
NINRGDVRTL

SEQ ID NO: 143455 - protein, 10 aa, synthetic construct
NIQRGDVRTL

SEQ ID NO: 143456 - protein, 10 aa, synthetic construct
NIDRGDVRTL

SEQ ID NO: 143457 - protein, 10 aa, synthetic construct
NIERGDVRTL

SEQ ID NO: 143458 - protein, 10 aa, synthetic construct
NMGRGDVRTL

SEQ ID NO: 143459 - protein, 10 aa, synthetic construct
NMARGDVRTL

SEQ ID NO: 143460 - protein, 10 aa, synthetic construct
NMVRGDVRTL

SEQ ID NO: 143461 - protein, 10 aa, synthetic construct
NMPRGDVRTL

SEQ ID NO: 143462 - protein, 10 aa, synthetic construct
NMLRGDVRTL

SEQ ID NO: 143463 - protein, 10 aa, synthetic construct
NMIRGDVRTL

SEQ ID NO: 143464 - protein, 10 aa, synthetic construct
NMMRGDVRTL

SEQ ID NO: 143465 - protein, 10 aa, synthetic construct
NMWRGDVRTL

SEQ ID NO: 143466 - protein, 10 aa, synthetic construct
NMFRGDVRTL

SEQ ID NO: 143467 - protein, 10 aa, synthetic construct
NMKRGDVRTL

SEQ ID NO: 143468 - protein, 10 aa, synthetic construct
NMRRGDVRTL

SEQ ID NO: 143469 - protein, 10 aa, synthetic construct
NMHRGDVRTL

SEQ ID NO: 143470 - protein, 10 aa, synthetic construct
NMSRGDVRTL

SEQ ID NO: 143471 - protein, 10 aa, synthetic construct
NMTRGDVRTL

SEQ ID NO: 143472 - protein, 10 aa, synthetic construct
NMYRGDVRTL

SEQ ID NO: 143473 - protein, 10 aa, synthetic construct
NMNRGDVRTL

SEQ ID NO: 143474 - protein, 10 aa, synthetic construct
NMQRGDVRTL

SEQ ID NO: 143475 - protein, 10 aa, synthetic construct
NMDRGDVRTL

SEQ ID NO: 143476 - protein, 10 aa, synthetic construct
NMERGDVRTL

SEQ ID NO: 143477 - protein, 10 aa, synthetic construct
NWGRGDVRTL

SEQ ID NO: 143478 - protein, 10 aa, synthetic construct
NWARGDVRTL

SEQ ID NO: 143479 - protein, 10 aa, synthetic construct
NWVRGDVRTL

SEQ ID NO: 143480 - protein, 10 aa, synthetic construct
NWPRGDVRTL

SEQ ID NO: 143481 - protein, 10 aa, synthetic construct
NWLRGDVRTL

SEQ ID NO: 143482 - protein, 10 aa, synthetic construct
NWIRGDVRTL

SEQ ID NO: 143483 - protein, 10 aa, synthetic construct
NWMRGDVRTL

SEQ ID NO: 143484 - protein, 10 aa, synthetic construct
NWWRGDVRTL

SEQ ID NO: 143485 - protein, 10 aa, synthetic construct
NWFRGDVRTL

SEQ ID NO: 143486 - protein, 10 aa, synthetic construct
NWKRGDVRTL

SEQ ID NO: 143487 - protein, 10 aa, synthetic construct
NWRRGDVRTL

SEQ ID NO: 143488 - protein, 10 aa, synthetic construct
NWHRGDVRTL

SEQ ID NO: 143489 - protein, 10 aa, synthetic construct
NWSRGDVRTL

SEQ ID NO: 143490 - protein, 10 aa, synthetic construct
NWTRGDVRTL

SEQ ID NO: 143491 - protein, 10 aa, synthetic construct
NWYRGDVRTL

SEQ ID NO: 143492 - protein, 10 aa, synthetic construct
NWNRGDVRTL

SEQ ID NO: 143493 - protein, 10 aa, synthetic construct
NWQRGDVRTL

SEQ ID NO: 143494 - protein, 10 aa, synthetic construct
NWDRGDVRTL

SEQ ID NO: 143495 - protein, 10 aa, synthetic construct
NWERGDVRTL

SEQ ID NO: 143496 - protein, 10 aa, synthetic construct
NFGRGDVRTL

SEQ ID NO: 143497 - protein, 10 aa, synthetic construct
NFARGDVRTL

SEQ ID NO: 143498 - protein, 10 aa, synthetic construct
NFVRGDVRTL

SEQ ID NO: 143499 - protein, 10 aa, synthetic construct
NFPRGDVRTL

SEQ ID NO: 143500 - protein, 10 aa, synthetic construct
NFLRGDVRTL

SEQ ID NO: 143501 - protein, 10 aa, synthetic construct
NFIRGDVRTL

SEQ ID NO: 143502 - protein, 10 aa, synthetic construct
NFMRGDVRTL

SEQ ID NO: 143503 - protein, 10 aa, synthetic construct
NFWRGDVRTL

SEQ ID NO: 143504 - protein, 10 aa, synthetic construct
NFFRGDVRTL

SEQ ID NO: 143505 - protein, 10 aa, synthetic construct
NFKRGDVRTL

SEQ ID NO: 143506 - protein, 10 aa, synthetic construct
NFRRGDVRTL

SEQ ID NO: 143507 - protein, 10 aa, synthetic construct
NFHRGDVRTL

SEQ ID NO: 143508 - protein, 10 aa, synthetic construct
NFSRGDVRTL

SEQ ID NO: 143509 - protein, 10 aa, synthetic construct
NFTRGDVRTL

SEQ ID NO: 143510 - protein, 10 aa, synthetic construct
NFYRGDVRTL

SEQ ID NO: 143511 - protein, 10 aa, synthetic construct
NFNRGDVRTL

SEQ ID NO: 143512 - protein, 10 aa, synthetic construct
NFQRGDVRTL

SEQ ID NO: 143513 - protein, 10 aa, synthetic construct
NFDRGDVRTL

SEQ ID NO: 143514 - protein, 10 aa, synthetic construct
NFERGDVRTL

SEQ ID NO: 143515 - protein, 10 aa, synthetic construct
NKGRGDVRTL

SEQ ID NO: 143516 - protein, 10 aa, synthetic construct
NKARGDVRTL

SEQ ID NO: 143517 - protein, 10 aa, synthetic construct
NKVRGDVRTL

SEQ ID NO: 143518 - protein, 10 aa, synthetic construct
NKPRGDVRTL

SEQ ID NO: 143519 - protein, 10 aa, synthetic construct
NKLRGDVRTL

SEQ ID NO: 143520 - protein, 10 aa, synthetic construct
NKIRGDVRTL

SEQ ID NO: 143521 - protein, 10 aa, synthetic construct
NKMRGDVRTL

SEQ ID NO: 143522 - protein, 10 aa, synthetic construct
NKWRGDVRTL

SEQ ID NO: 143523 - protein, 10 aa, synthetic construct
NKFRGDVRTL

SEQ ID NO: 143524 - protein, 10 aa, synthetic construct
NKKRGDVRTL

SEQ ID NO: 143525 - protein, 10 aa, synthetic construct
NKRRGDVRTL

SEQ ID NO: 143526 - protein, 10 aa, synthetic construct
NKHRGDVRTL

SEQ ID NO: 143527 - protein, 10 aa, synthetic construct
NKSRGDVRTL

SEQ ID NO: 143528 - protein, 10 aa, synthetic construct
NKTRGDVRTL

SEQ ID NO: 143529 - protein, 10 aa, synthetic construct
NKYRGDVRTL

SEQ ID NO: 143530 - protein, 10 aa, synthetic construct
NKNRGDVRTL

SEQ ID NO: 143531 - protein, 10 aa, synthetic construct
NKQRGDVRTL

SEQ ID NO: 143532 - protein, 10 aa, synthetic construct
NKDRGDVRTL

SEQ ID NO: 143533 - protein, 10 aa, synthetic construct
NKERGDVRTL

SEQ ID NO: 143534 - protein, 10 aa, synthetic construct
NRGRGDVRTL

SEQ ID NO: 143535 - protein, 10 aa, synthetic construct
NRARGDVRTL

SEQ ID NO: 143536 - protein, 10 aa, synthetic construct
NRVRGDVRTL

SEQ ID NO: 143537 - protein, 10 aa, synthetic construct
NRPRGDVRTL

SEQ ID NO: 143538 - protein, 10 aa, synthetic construct
NRLRGDVRTL

SEQ ID NO: 143539 - protein, 10 aa, synthetic construct
NRIRGDVRTL

SEQ ID NO: 143540 - protein, 10 aa, synthetic construct
NRMRGDVRTL

SEQ ID NO: 143541 - protein, 10 aa, synthetic construct
NRWRGDVRTL

SEQ ID NO: 143542 - protein, 10 aa, synthetic construct
NRFRGDVRTL

SEQ ID NO: 143543 - protein, 10 aa, synthetic construct
NRKRGDVRTL

SEQ ID NO: 143544 - protein, 10 aa, synthetic construct
NRRRGDVRTL

SEQ ID NO: 143545 - protein, 10 aa, synthetic construct
NRHRGDVRTL

SEQ ID NO: 143546 - protein, 10 aa, synthetic construct
NRSRGDVRTL

SEQ ID NO: 143547 - protein, 10 aa, synthetic construct
NRTRGDVRTL

SEQ ID NO: 143548 - protein, 10 aa, synthetic construct
NRYRGDVRTL

SEQ ID NO: 143549 - protein, 10 aa, synthetic construct
NRNRGDVRTL

SEQ ID NO: 143550 - protein, 10 aa, synthetic construct
NRQRGDVRTL

SEQ ID NO: 143551 - protein, 10 aa, synthetic construct
NRDRGDVRTL

SEQ ID NO: 143552 - protein, 10 aa, synthetic construct
NRERGDVRTL

SEQ ID NO: 143553 - protein, 10 aa, synthetic construct
NHGRGDVRTL

SEQ ID NO: 143554 - protein, 10 aa, synthetic construct
NHARGDVRTL

SEQ ID NO: 143555 - protein, 10 aa, synthetic construct
NHVRGDVRTL

SEQ ID NO: 143556 - protein, 10 aa, synthetic construct
NHPRGDVRTL

SEQ ID NO: 143557 - protein, 10 aa, synthetic construct
NHLRGDVRTL

SEQ ID NO: 143558 - protein, 10 aa, synthetic construct
NHIRGDVRTL

SEQ ID NO: 143559 - protein, 10 aa, synthetic construct
NHMRGDVRTL

SEQ ID NO: 143560 - protein, 10 aa, synthetic construct
NHWRGDVRTL

SEQ ID NO: 143561 - protein, 10 aa, synthetic construct
NHFRGDVRTL

SEQ ID NO: 143562 - protein, 10 aa, synthetic construct
NHKRGDVRTL

SEQ ID NO: 143563 - protein, 10 aa, synthetic construct
NHRRGDVRTL

SEQ ID NO: 143564 - protein, 10 aa, synthetic construct
NHHRGDVRTL

SEQ ID NO: 143565 - protein, 10 aa, synthetic construct
NHSRGDVRTL

SEQ ID NO: 143566 - protein, 10 aa, synthetic construct
NHTRGDVRTL

SEQ ID NO: 143567 - protein, 10 aa, synthetic construct
NHYRGDVRTL

SEQ ID NO: 143568 - protein, 10 aa, synthetic construct
NHNRGDVRTL

SEQ ID NO: 143569 - protein, 10 aa, synthetic construct
NHQRGDVRTL

SEQ ID NO: 143570 - protein, 10 aa, synthetic construct
NHDRGDVRTL

SEQ ID NO: 143571 - protein, 10 aa, synthetic construct
NHERGDVRTL

SEQ ID NO: 143572 - protein, 10 aa, synthetic construct
NSGRGDVRTL

SEQ ID NO: 143573 - protein, 10 aa, synthetic construct
NSARGDVRTL

SEQ ID NO: 143574 - protein, 10 aa, synthetic construct
NSVRGDVRTL

SEQ ID NO: 143575 - protein, 10 aa, synthetic construct
NSPRGDVRTL

SEQ ID NO: 143576 - protein, 10 aa, synthetic construct
NSLRGDVRTL

SEQ ID NO: 143577 - protein, 10 aa, synthetic construct
NSIRGDVRTL

SEQ ID NO: 143578 - protein, 10 aa, synthetic construct
NSMRGDVRTL

SEQ ID NO: 143579 - protein, 10 aa, synthetic construct
NSWRGDVRTL

SEQ ID NO: 143580 - protein, 10 aa, synthetic construct
NSFRGDVRTL

SEQ ID NO: 143581 - protein, 10 aa, synthetic construct
NSKRGDVRTL

SEQ ID NO: 143582 - protein, 10 aa, synthetic construct
NSRRGDVRTL

SEQ ID NO: 143583 - protein, 10 aa, synthetic construct
NSHRGDVRTL

SEQ ID NO: 143584 - protein, 10 aa, synthetic construct
NSSRGDVRTL

SEQ ID NO: 143585 - protein, 10 aa, synthetic construct
NSTRGDVRTL

SEQ ID NO: 143586 - protein, 10 aa, synthetic construct
NSYRGDVRTL

SEQ ID NO: 143587 - protein, 10 aa, synthetic construct
NSNRGDVRTL

SEQ ID NO: 143588 - protein, 10 aa, synthetic construct
NSQRGDVRTL

SEQ ID NO: 143589 - protein, 10 aa, synthetic construct
NSDRGDVRTL

SEQ ID NO: 143590 - protein, 10 aa, synthetic construct
NSERGDVRTL

SEQ ID NO: 143591 - protein, 10 aa, synthetic construct
NTGRGDVRTL

SEQ ID NO: 143592 - protein, 10 aa, synthetic construct
NTARGDVRTL

SEQ ID NO: 143593 - protein, 10 aa, synthetic construct
NTVRGDVRTL

SEQ ID NO: 143594 - protein, 10 aa, synthetic construct
NTPRGDVRTL

SEQ ID NO: 143595 - protein, 10 aa, synthetic construct
NTLRGDVRTL

SEQ ID NO: 143596 - protein, 10 aa, synthetic construct
NTIRGDVRTL

SEQ ID NO: 143597 - protein, 10 aa, synthetic construct
NTMRGDVRTL

SEQ ID NO: 143598 - protein, 10 aa, synthetic construct
NTWRGDVRTL

SEQ ID NO: 143599 - protein, 10 aa, synthetic construct
NTFRGDVRTL

SEQ ID NO: 143600 - protein, 10 aa, synthetic construct
NTKRGDVRTL

SEQ ID NO: 143601 - protein, 10 aa, synthetic construct
NTRRGDVRTL

SEQ ID NO: 143602 - protein, 10 aa, synthetic construct
NTHRGDVRTL

SEQ ID NO: 143603 - protein, 10 aa, synthetic construct
NTSRGDVRTL

SEQ ID NO: 143604 - protein, 10 aa, synthetic construct
NTTRGDVRTL

SEQ ID NO: 143605 - protein, 10 aa, synthetic construct
NTYRGDVRTL

SEQ ID NO: 143606 - protein, 10 aa, synthetic construct
NTNRGDVRTL

SEQ ID NO: 143607 - protein, 10 aa, synthetic construct
NTQRGDVRTL

SEQ ID NO: 143608 - protein, 10 aa, synthetic construct
NTDRGDVRTL

SEQ ID NO: 143609 - protein, 10 aa, synthetic construct
NTERGDVRTL

SEQ ID NO: 143610 - protein, 10 aa, synthetic construct
NYGRGDVRTL

SEQ ID NO: 143611 - protein, 10 aa, synthetic construct
NYARGDVRTL

SEQ ID NO: 143612 - protein, 10 aa, synthetic construct
NYVRGDVRTL

SEQ ID NO: 143613 - protein, 10 aa, synthetic construct
NYPRGDVRTL

SEQ ID NO: 143614 - protein, 10 aa, synthetic construct
NYLRGDVRTL

SEQ ID NO: 143615 - protein, 10 aa, synthetic construct
NYIRGDVRTL

SEQ ID NO: 143616 - protein, 10 aa, synthetic construct
NYMRGDVRTL

SEQ ID NO: 143617 - protein, 10 aa, synthetic construct
NYWRGDVRTL

SEQ ID NO: 143618 - protein, 10 aa, synthetic construct
NYFRGDVRTL

SEQ ID NO: 143619 - protein, 10 aa, synthetic construct
NYKRGDVRTL

SEQ ID NO: 143620 - protein, 10 aa, synthetic construct
NYRRGDVRTL

SEQ ID NO: 143621 - protein, 10 aa, synthetic construct
NYHRGDVRTL

SEQ ID NO: 143622 - protein, 10 aa, synthetic construct
NYSRGDVRTL

SEQ ID NO: 143623 - protein, 10 aa, synthetic construct
NYTRGDVRTL

SEQ ID NO: 143624 - protein, 10 aa, synthetic construct
NYYRGDVRTL

SEQ ID NO: 143625 - protein, 10 aa, synthetic construct
NYNRGDVRTL

SEQ ID NO: 143626 - protein, 10 aa, synthetic construct
NYQRGDVRTL

SEQ ID NO: 143627 - protein, 10 aa, synthetic construct
NYDRGDVRTL

SEQ ID NO: 143628 - protein, 10 aa, synthetic construct
NYERGDVRTL

SEQ ID NO: 143629 - protein, 10 aa, synthetic construct
NNGRGDVRTL

SEQ ID NO: 143630 - protein, 10 aa, synthetic construct
NNARGDVRTL

SEQ ID NO: 143631 - protein, 10 aa, synthetic construct
NNVRGDVRTL

SEQ ID NO: 143632 - protein, 10 aa, synthetic construct
NNPRGDVRTL

SEQ ID NO: 143633 - protein, 10 aa, synthetic construct
NNLRGDVRTL

SEQ ID NO: 143634 - protein, 10 aa, synthetic construct
NNIRGDVRTL

SEQ ID NO: 143635 - protein, 10 aa, synthetic construct
NNMRGDVRTL

SEQ ID NO: 143636 - protein, 10 aa, synthetic construct
NNWRGDVRTL

SEQ ID NO: 143637 - protein, 10 aa, synthetic construct
NNFRGDVRTL

SEQ ID NO: 143638 - protein, 10 aa, synthetic construct
NNKRGDVRTL

SEQ ID NO: 143639 - protein, 10 aa, synthetic construct
NNRRGDVRTL

SEQ ID NO: 143640 - protein, 10 aa, synthetic construct
NNHRGDVRTL

SEQ ID NO: 143641 - protein, 10 aa, synthetic construct
NNSRGDVRTL

SEQ ID NO: 143642 - protein, 10 aa, synthetic construct
NNTRGDVRTL

SEQ ID NO: 143643 - protein, 10 aa, synthetic construct
NNYRGDVRTL

SEQ ID NO: 143644 - protein, 10 aa, synthetic construct
NNNRGDVRTL

SEQ ID NO: 143645 - protein, 10 aa, synthetic construct
NNQRGDVRTL

SEQ ID NO: 143646 - protein, 10 aa, synthetic construct
NNDRGDVRTL

SEQ ID NO: 143647 - protein, 10 aa, synthetic construct
NNERGDVRTL

SEQ ID NO: 143648 - protein, 10 aa, synthetic construct
NQGRGDVRTL

SEQ ID NO: 143649 - protein, 10 aa, synthetic construct
NQARGDVRTL

SEQ ID NO: 143650 - protein, 10 aa, synthetic construct
NQVRGDVRTL

SEQ ID NO: 143651 - protein, 10 aa, synthetic construct
NQPRGDVRTL

SEQ ID NO: 143652 - protein, 10 aa, synthetic construct
NQLRGDVRTL

SEQ ID NO: 143653 - protein, 10 aa, synthetic construct
NQIRGDVRTL

SEQ ID NO: 143654 - protein, 10 aa, synthetic construct
NQMRGDVRTL

SEQ ID NO: 143655 - protein, 10 aa, synthetic construct
NQWRGDVRTL

SEQ ID NO: 143656 - protein, 10 aa, synthetic construct
NQFRGDVRTL

SEQ ID NO: 143657 - protein, 10 aa, synthetic construct
NQKRGDVRTL

SEQ ID NO: 143658 - protein, 10 aa, synthetic construct
NQRRGDVRTL

SEQ ID NO: 143659 - protein, 10 aa, synthetic construct
NQHRGDVRTL

SEQ ID NO: 143660 - protein, 10 aa, synthetic construct
NQSRGDVRTL

SEQ ID NO: 143661 - protein, 10 aa, synthetic construct
NQTRGDVRTL

SEQ ID NO: 143662 - protein, 10 aa, synthetic construct
NQYRGDVRTL

SEQ ID NO: 143663 - protein, 10 aa, synthetic construct
NQNRGDVRTL

SEQ ID NO: 143664 - protein, 10 aa, synthetic construct
NQQRGDVRTL

SEQ ID NO: 143665 - protein, 10 aa, synthetic construct
NQDRGDVRTL

SEQ ID NO: 143666 - protein, 10 aa, synthetic construct
NQERGDVRTL

SEQ ID NO: 143667 - protein, 10 aa, synthetic construct
NDGRGDVRTL

SEQ ID NO: 143668 - protein, 10 aa, synthetic construct
NDARGDVRTL

SEQ ID NO: 143669 - protein, 10 aa, synthetic construct
NDVRGDVRTL

SEQ ID NO: 143670 - protein, 10 aa, synthetic construct
NDPRGDVRTL

SEQ ID NO: 143671 - protein, 10 aa, synthetic construct
NDLRGDVRTL

SEQ ID NO: 143672 - protein, 10 aa, synthetic construct
NDIRGDVRTL

SEQ ID NO: 143673 - protein, 10 aa, synthetic construct
NDMRGDVRTL

SEQ ID NO: 143674 - protein, 10 aa, synthetic construct
NDWRGDVRTL

SEQ ID NO: 143675 - protein, 10 aa, synthetic construct
NDFRGDVRTL

SEQ ID NO: 143676 - protein, 10 aa, synthetic construct
NDKRGDVRTL

SEQ ID NO: 143677 - protein, 10 aa, synthetic construct
NDRRGDVRTL

SEQ ID NO: 143678 - protein, 10 aa, synthetic construct
NDHRGDVRTL

SEQ ID NO: 143679 - protein, 10 aa, synthetic construct
NDSRGDVRTL

SEQ ID NO: 143680 - protein, 10 aa, synthetic construct
NDTRGDVRTL

SEQ ID NO: 143681 - protein, 10 aa, synthetic construct
NDYRGDVRTL

SEQ ID NO: 143682 - protein, 10 aa, synthetic construct
NDNRGDVRTL

SEQ ID NO: 143683 - protein, 10 aa, synthetic construct
NDQRGDVRTL

SEQ ID NO: 143684 - protein, 10 aa, synthetic construct
NDDRGDVRTL

SEQ ID NO: 143685 - protein, 10 aa, synthetic construct
NDERGDVRTL

SEQ ID NO: 143686 - protein, 10 aa, synthetic construct
NEGRGDVRTL

SEQ ID NO: 143687 - protein, 10 aa, synthetic construct
NEARGDVRTL

SEQ ID NO: 143688 - protein, 10 aa, synthetic construct
NEVRGDVRTL

SEQ ID NO: 143689 - protein, 10 aa, synthetic construct
NEPRGDVRTL

SEQ ID NO: 143690 - protein, 10 aa, synthetic construct
NELRGDVRTL

SEQ ID NO: 143691 - protein, 10 aa, synthetic construct
NEIRGDVRTL

SEQ ID NO: 143692 - protein, 10 aa, synthetic construct
NEMRGDVRTL

SEQ ID NO: 143693 - protein, 10 aa, synthetic construct
NEWRGDVRTL

SEQ ID NO: 143694 - protein, 10 aa, synthetic construct
NEFRGDVRTL

SEQ ID NO: 143695 - protein, 10 aa, synthetic construct
NEKRGDVRTL

SEQ ID NO: 143696 - protein, 10 aa, synthetic construct
NERRGDVRTL

SEQ ID NO: 143697 - protein, 10 aa, synthetic construct
NEHRGDVRTL

SEQ ID NO: 143698 - protein, 10 aa, synthetic construct
NESRGDVRTL

SEQ ID NO: 143699 - protein, 10 aa, synthetic construct
NETRGDVRTL

SEQ ID NO: 143700 - protein, 10 aa, synthetic construct
NEYRGDVRTL

SEQ ID NO: 143701 - protein, 10 aa, synthetic construct
NENRGDVRTL

SEQ ID NO: 143702 - protein, 10 aa, synthetic construct
NEQRGDVRTL

SEQ ID NO: 143703 - protein, 10 aa, synthetic construct
NEDRGDVRTL

SEQ ID NO: 143704 - protein, 10 aa, synthetic construct
NEERGDVRTL

SEQ ID NO: 143705 - protein, 10 aa, synthetic construct
DGGRGDVRTL

SEQ ID NO: 143706 - protein, 10 aa, synthetic construct
DGARGDVRTL

SEQ ID NO: 143707 - protein, 10 aa, synthetic construct
DGVRGDVRTL

SEQ ID NO: 143708 - protein, 10 aa, synthetic construct
DGPRGDVRTL

SEQ ID NO: 143709 - protein, 10 aa, synthetic construct
DGLRGDVRTL

SEQ ID NO: 143710 - protein, 10 aa, synthetic construct
DGIRGDVRTL

SEQ ID NO: 143711 - protein, 10 aa, synthetic construct
DGMRGDVRTL

SEQ ID NO: 143712 - protein, 10 aa, synthetic construct
DGWRGDVRTL

SEQ ID NO: 143713 - protein, 10 aa, synthetic construct
DGFRGDVRTL

SEQ ID NO: 143714 - protein, 10 aa, synthetic construct
DGKRGDVRTL

SEQ ID NO: 143715 - protein, 10 aa, synthetic construct
DGRRGDVRTL

SEQ ID NO: 143716 - protein, 10 aa, synthetic construct
DGHRGDVRTL

SEQ ID NO: 143717 - protein, 10 aa, synthetic construct
DGSRGDVRTL

SEQ ID NO: 143718 - protein, 10 aa, synthetic construct
DGTRGDVRTL

SEQ ID NO: 143719 - protein, 10 aa, synthetic construct
DGYRGDVRTL

SEQ ID NO: 143720 - protein, 10 aa, synthetic construct
DGNRGDVRTL

SEQ ID NO: 143721 - protein, 10 aa, synthetic construct
DGQRGDVRTL

SEQ ID NO: 143722 - protein, 10 aa, synthetic construct
DGDRGDVRTL

SEQ ID NO: 143723 - protein, 10 aa, synthetic construct
DGERGDVRTL

SEQ ID NO: 143724 - protein, 10 aa, synthetic construct
DAGRGDVRTL

SEQ ID NO: 143725 - protein, 10 aa, synthetic construct
DAARGDVRTL

SEQ ID NO: 143726 - protein, 10 aa, synthetic construct
DAVRGDVRTL

SEQ ID NO: 143727 - protein, 10 aa, synthetic construct
DAPRGDVRTL

SEQ ID NO: 143728 - protein, 10 aa, synthetic construct
DALRGDVRTL

SEQ ID NO: 143729 - protein, 10 aa, synthetic construct
DAIRGDVRTL

SEQ ID NO: 143730 - protein, 10 aa, synthetic construct
DAMRGDVRTL

SEQ ID NO: 143731 - protein, 10 aa, synthetic construct
DAWRGDVRTL

SEQ ID NO: 143732 - protein, 10 aa, synthetic construct
DAFRGDVRTL

SEQ ID NO: 143733 - protein, 10 aa, synthetic construct
DAKRGDVRTL

SEQ ID NO: 143734 - protein, 10 aa, synthetic construct
DARRGDVRTL

SEQ ID NO: 143735 - protein, 10 aa, synthetic construct
DAHRGDVRTL

SEQ ID NO: 143736 - protein, 10 aa, synthetic construct
DASRGDVRTL

SEQ ID NO: 143737 - protein, 10 aa, synthetic construct
DATRGDVRTL

SEQ ID NO: 143738 - protein, 10 aa, synthetic construct
DAYRGDVRTL

SEQ ID NO: 143739 - protein, 10 aa, synthetic construct
DANRGDVRTL

SEQ ID NO: 143740 - protein, 10 aa, synthetic construct
DAQRGDVRTL

SEQ ID NO: 143741 - protein, 10 aa, synthetic construct
DADRGDVRTL

SEQ ID NO: 143742 - protein, 10 aa, synthetic construct
DAERGDVRTL

SEQ ID NO: 143743 - protein, 10 aa, synthetic construct
DVGRGDVRTL

SEQ ID NO: 143744 - protein, 10 aa, synthetic construct
DVARGDVRTL

SEQ ID NO: 143745 - protein, 10 aa, synthetic construct
DVVRGDVRTL

SEQ ID NO: 143746 - protein, 10 aa, synthetic construct
DVPRGDVRTL

SEQ ID NO: 143747 - protein, 10 aa, synthetic construct
DVLRGDVRTL

SEQ ID NO: 143748 - protein, 10 aa, synthetic construct
DVIRGDVRTL

SEQ ID NO: 143749 - protein, 10 aa, synthetic construct
DVMRGDVRTL

SEQ ID NO: 143750 - protein, 10 aa, synthetic construct
DVWRGDVRTL

SEQ ID NO: 143751 - protein, 10 aa, synthetic construct
DVFRGDVRTL

SEQ ID NO: 143752 - protein, 10 aa, synthetic construct
DVKRGDVRTL

SEQ ID NO: 143753 - protein, 10 aa, synthetic construct
DVRRGDVRTL

SEQ ID NO: 143754 - protein, 10 aa, synthetic construct
DVHRGDVRTL

SEQ ID NO: 143755 - protein, 10 aa, synthetic construct
DVSRGDVRTL

SEQ ID NO: 143756 - protein, 10 aa, synthetic construct
DVTRGDVRTL

SEQ ID NO: 143757 - protein, 10 aa, synthetic construct
DVYRGDVRTL

SEQ ID NO: 143758 - protein, 10 aa, synthetic construct
DVNRGDVRTL

SEQ ID NO: 143759 - protein, 10 aa, synthetic construct
DVQRGDVRTL

SEQ ID NO: 143760 - protein, 10 aa, synthetic construct
DVDRGDVRTL

SEQ ID NO: 143761 - protein, 10 aa, synthetic construct
DVERGDVRTL

SEQ ID NO: 143762 - protein, 10 aa, synthetic construct
DPGRGDVRTL

SEQ ID NO: 143763 - protein, 10 aa, synthetic construct
DPARGDVRTL

SEQ ID NO: 143764 - protein, 10 aa, synthetic construct
DPVRGDVRTL

SEQ ID NO: 143765 - protein, 10 aa, synthetic construct
DPPRGDVRTL

SEQ ID NO: 143766 - protein, 10 aa, synthetic construct
DPLRGDVRTL

SEQ ID NO: 143767 - protein, 10 aa, synthetic construct
DPIRGDVRTL

SEQ ID NO: 143768 - protein, 10 aa, synthetic construct
DPMRGDVRTL

SEQ ID NO: 143769 - protein, 10 aa, synthetic construct
DPWRGDVRTL

SEQ ID NO: 143770 - protein, 10 aa, synthetic construct
DPFRGDVRTL

SEQ ID NO: 143771 - protein, 10 aa, synthetic construct
DPKRGDVRTL

SEQ ID NO: 143772 - protein, 10 aa, synthetic construct
DPRRGDVRTL

SEQ ID NO: 143773 - protein, 10 aa, synthetic construct
DPHRGDVRTL

SEQ ID NO: 143774 - protein, 10 aa, synthetic construct
DPSRGDVRTL

SEQ ID NO: 143775 - protein, 10 aa, synthetic construct
DPTRGDVRTL

SEQ ID NO: 143776 - protein, 10 aa, synthetic construct
DPYRGDVRTL

SEQ ID NO: 143777 - protein, 10 aa, synthetic construct
DPNRGDVRTL

SEQ ID NO: 143778 - protein, 10 aa, synthetic construct
DPQRGDVRTL

SEQ ID NO: 143779 - protein, 10 aa, synthetic construct
DPDRGDVRTL

SEQ ID NO: 143780 - protein, 10 aa, synthetic construct
DPERGDVRTL

SEQ ID NO: 143781 - protein, 10 aa, synthetic construct
DLGRGDVRTL

SEQ ID NO: 143782 - protein, 10 aa, synthetic construct
DLARGDVRTL

SEQ ID NO: 143783 - protein, 10 aa, synthetic construct
DLVRGDVRTL

SEQ ID NO: 143784 - protein, 10 aa, synthetic construct
DLPRGDVRTL

SEQ ID NO: 143785 - protein, 10 aa, synthetic construct
DLLRGDVRTL

SEQ ID NO: 143786 - protein, 10 aa, synthetic construct
DLIRGDVRTL

SEQ ID NO: 143787 - protein, 10 aa, synthetic construct
DLMRGDVRTL

SEQ ID NO: 143788 - protein, 10 aa, synthetic construct
DLWRGDVRTL

SEQ ID NO: 143789 - protein, 10 aa, synthetic construct
DLFRGDVRTL

SEQ ID NO: 143790 - protein, 10 aa, synthetic construct
DLKRGDVRTL

SEQ ID NO: 143791 - protein, 10 aa, synthetic construct
DLRRGDVRTL

SEQ ID NO: 143792 - protein, 10 aa, synthetic construct
DLHRGDVRTL

SEQ ID NO: 143793 - protein, 10 aa, synthetic construct
DLSRGDVRTL

SEQ ID NO: 143794 - protein, 10 aa, synthetic construct
DLTRGDVRTL

SEQ ID NO: 143795 - protein, 10 aa, synthetic construct
DLYRGDVRTL

SEQ ID NO: 143796 - protein, 10 aa, synthetic construct
DLNRGDVRTL

SEQ ID NO: 143797 - protein, 10 aa, synthetic construct
DLQRGDVRTL

SEQ ID NO: 143798 - protein, 10 aa, synthetic construct
DLDRGDVRTL

SEQ ID NO: 143799 - protein, 10 aa, synthetic construct
DLERGDVRTL

SEQ ID NO: 143800 - protein, 10 aa, synthetic construct
DIGRGDVRTL

SEQ ID NO: 143801 - protein, 10 aa, synthetic construct
DIARGDVRTL

SEQ ID NO: 143802 - protein, 10 aa, synthetic construct
DIVRGDVRTL

SEQ ID NO: 143803 - protein, 10 aa, synthetic construct
DIPRGDVRTL

SEQ ID NO: 143804 - protein, 10 aa, synthetic construct
DILRGDVRTL

SEQ ID NO: 143805 - protein, 10 aa, synthetic construct
DIIRGDVRTL

SEQ ID NO: 143806 - protein, 10 aa, synthetic construct
DIMRGDVRTL

SEQ ID NO: 143807 - protein, 10 aa, synthetic construct
DIWRGDVRTL

SEQ ID NO: 143808 - protein, 10 aa, synthetic construct
DIFRGDVRTL

SEQ ID NO: 143809 - protein, 10 aa, synthetic construct
DIKRGDVRTL

SEQ ID NO: 143810 - protein, 10 aa, synthetic construct
DIRRGDVRTL

SEQ ID NO: 143811 - protein, 10 aa, synthetic construct
DIHRGDVRTL

SEQ ID NO: 143812 - protein, 10 aa, synthetic construct
DISRGDVRTL

SEQ ID NO: 143813 - protein, 10 aa, synthetic construct
DITRGDVRTL

SEQ ID NO: 143814 - protein, 10 aa, synthetic construct
DIYRGDVRTL

SEQ ID NO: 143815 - protein, 10 aa, synthetic construct
DINRGDVRTL

SEQ ID NO: 143816 - protein, 10 aa, synthetic construct
DIQRGDVRTL

SEQ ID NO: 143817 - protein, 10 aa, synthetic construct
DIDRGDVRTL

SEQ ID NO: 143818 - protein, 10 aa, synthetic construct
DIERGDVRTL

SEQ ID NO: 143819 - protein, 10 aa, synthetic construct
DMGRGDVRTL

SEQ ID NO: 143820 - protein, 10 aa, synthetic construct
DMARGDVRTL

SEQ ID NO: 143821 - protein, 10 aa, synthetic construct
DMVRGDVRTL

SEQ ID NO: 143822 - protein, 10 aa, synthetic construct
DMPRGDVRTL

SEQ ID NO: 143823 - protein, 10 aa, synthetic construct
DMLRGDVRTL

SEQ ID NO: 143824 - protein, 10 aa, synthetic construct
DMIRGDVRTL

SEQ ID NO: 143825 - protein, 10 aa, synthetic construct
DMMRGDVRTL

SEQ ID NO: 143826 - protein, 10 aa, synthetic construct
DMWRGDVRTL

SEQ ID NO: 143827 - protein, 10 aa, synthetic construct
DMFRGDVRTL

SEQ ID NO: 143828 - protein, 10 aa, synthetic construct
DMKRGDVRTL

SEQ ID NO: 143829 - protein, 10 aa, synthetic construct
DMRRGDVRTL

SEQ ID NO: 143830 - protein, 10 aa, synthetic construct
DMHRGDVRTL

SEQ ID NO: 143831 - protein, 10 aa, synthetic construct
DMSRGDVRTL

SEQ ID NO: 143832 - protein, 10 aa, synthetic construct
DMTRGDVRTL

SEQ ID NO: 143833 - protein, 10 aa, synthetic construct
DMYRGDVRTL

SEQ ID NO: 143834 - protein, 10 aa, synthetic construct
DMNRGDVRTL

SEQ ID NO: 143835 - protein, 10 aa, synthetic construct
DMQRGDVRTL

SEQ ID NO: 143836 - protein, 10 aa, synthetic construct
DMDRGDVRTL

SEQ ID NO: 143837 - protein, 10 aa, synthetic construct
DMERGDVRTL

SEQ ID NO: 143838 - protein, 10 aa, synthetic construct
DWGRGDVRTL

SEQ ID NO: 143839 - protein, 10 aa, synthetic construct
DWARGDVRTL

SEQ ID NO: 143840 - protein, 10 aa, synthetic construct
DWVRGDVRTL

SEQ ID NO: 143841 - protein, 10 aa, synthetic construct
DWPRGDVRTL

SEQ ID NO: 143842 - protein, 10 aa, synthetic construct
DWLRGDVRTL

SEQ ID NO: 143843 - protein, 10 aa, synthetic construct
DWIRGDVRTL

SEQ ID NO: 143844 - protein, 10 aa, synthetic construct
DWMRGDVRTL

SEQ ID NO: 143845 - protein, 10 aa, synthetic construct
DWWRGDVRTL

SEQ ID NO: 143846 - protein, 10 aa, synthetic construct
DWFRGDVRTL

SEQ ID NO: 143847 - protein, 10 aa, synthetic construct
DWKRGDVRTL

SEQ ID NO: 143848 - protein, 10 aa, synthetic construct
DWRRGDVRTL

SEQ ID NO: 143849 - protein, 10 aa, synthetic construct
DWHRGDVRTL

SEQ ID NO: 143850 - protein, 10 aa, synthetic construct
DWSRGDVRTL

SEQ ID NO: 143851 - protein, 10 aa, synthetic construct
DWTRGDVRTL

SEQ ID NO: 143852 - protein, 10 aa, synthetic construct
DWYRGDVRTL

SEQ ID NO: 143853 - protein, 10 aa, synthetic construct
DWNRGDVRTL

SEQ ID NO: 143854 - protein, 10 aa, synthetic construct
DWQRGDVRTL

SEQ ID NO: 143855 - protein, 10 aa, synthetic construct
DWDRGDVRTL

SEQ ID NO: 143856 - protein, 10 aa, synthetic construct
DWERGDVRTL

SEQ ID NO: 143857 - protein, 10 aa, synthetic construct
DFGRGDVRTL

SEQ ID NO: 143858 - protein, 10 aa, synthetic construct
DFARGDVRTL

SEQ ID NO: 143859 - protein, 10 aa, synthetic construct
DFVRGDVRTL

SEQ ID NO: 143860 - protein, 10 aa, synthetic construct
DFPRGDVRTL

SEQ ID NO: 143861 - protein, 10 aa, synthetic construct
DFLRGDVRTL

SEQ ID NO: 143862 - protein, 10 aa, synthetic construct
DFIRGDVRTL

SEQ ID NO: 143863 - protein, 10 aa, synthetic construct
DFMRGDVRTL

SEQ ID NO: 143864 - protein, 10 aa, synthetic construct
DFWRGDVRTL

SEQ ID NO: 143865 - protein, 10 aa, synthetic construct
DFFRGDVRTL

SEQ ID NO: 143866 - protein, 10 aa, synthetic construct
DFKRGDVRTL

SEQ ID NO: 143867 - protein, 10 aa, synthetic construct
DFRRGDVRTL

SEQ ID NO: 143868 - protein, 10 aa, synthetic construct
DFHRGDVRTL

SEQ ID NO: 143869 - protein, 10 aa, synthetic construct
DFSRGDVRTL

SEQ ID NO: 143870 - protein, 10 aa, synthetic construct
DFTRGDVRTL

SEQ ID NO: 143871 - protein, 10 aa, synthetic construct
DFYRGDVRTL

SEQ ID NO: 143872 - protein, 10 aa, synthetic construct
DFNRGDVRTL

SEQ ID NO: 143873 - protein, 10 aa, synthetic construct
DFQRGDVRTL

SEQ ID NO: 143874 - protein, 10 aa, synthetic construct
DFDRGDVRTL

SEQ ID NO: 143875 - protein, 10 aa, synthetic construct
DFERGDVRTL

SEQ ID NO: 143876 - protein, 10 aa, synthetic construct
DKGRGDVRTL

SEQ ID NO: 143877 - protein, 10 aa, synthetic construct
DKARGDVRTL

SEQ ID NO: 143878 - protein, 10 aa, synthetic construct
DKVRGDVRTL

SEQ ID NO: 143879 - protein, 10 aa, synthetic construct
DKPRGDVRTL

SEQ ID NO: 143880 - protein, 10 aa, synthetic construct
DKLRGDVRTL

SEQ ID NO: 143881 - protein, 10 aa, synthetic construct
DKIRGDVRTL

SEQ ID NO: 143882 - protein, 10 aa, synthetic construct
DKMRGDVRTL

SEQ ID NO: 143883 - protein, 10 aa, synthetic construct
DKWRGDVRTL

SEQ ID NO: 143884 - protein, 10 aa, synthetic construct
DKFRGDVRTL

SEQ ID NO: 143885 - protein, 10 aa, synthetic construct
DKKRGDVRTL

SEQ ID NO: 143886 - protein, 10 aa, synthetic construct
DKRRGDVRTL

SEQ ID NO: 143887 - protein, 10 aa, synthetic construct
DKHRGDVRTL

SEQ ID NO: 143888 - protein, 10 aa, synthetic construct
DKSRGDVRTL

SEQ ID NO: 143889 - protein, 10 aa, synthetic construct
DKTRGDVRTL

SEQ ID NO: 143890 - protein, 10 aa, synthetic construct
DKYRGDVRTL

SEQ ID NO: 143891 - protein, 10 aa, synthetic construct
DKNRGDVRTL

SEQ ID NO: 143892 - protein, 10 aa, synthetic construct
DKQRGDVRTL

SEQ ID NO: 143893 - protein, 10 aa, synthetic construct
DKDRGDVRTL

SEQ ID NO: 143894 - protein, 10 aa, synthetic construct
DKERGDVRTL

SEQ ID NO: 143895 - protein, 10 aa, synthetic construct
DRGRGDVRTL

SEQ ID NO: 143896 - protein, 10 aa, synthetic construct
DRARGDVRTL

SEQ ID NO: 143897 - protein, 10 aa, synthetic construct
DRVRGDVRTL

SEQ ID NO: 143898 - protein, 10 aa, synthetic construct
DRPRGDVRTL

SEQ ID NO: 143899 - protein, 10 aa, synthetic construct
DRLRGDVRTL

SEQ ID NO: 143900 - protein, 10 aa, synthetic construct
DRIRGDVRTL

SEQ ID NO: 143901 - protein, 10 aa, synthetic construct
DRMRGDVRTL

SEQ ID NO: 143902 - protein, 10 aa, synthetic construct
DRWRGDVRTL

SEQ ID NO: 143903 - protein, 10 aa, synthetic construct
DRFRGDVRTL

SEQ ID NO: 143904 - protein, 10 aa, synthetic construct
DRKRGDVRTL

SEQ ID NO: 143905 - protein, 10 aa, synthetic construct
DRRRGDVRTL

SEQ ID NO: 143906 - protein, 10 aa, synthetic construct
DRHRGDVRTL

SEQ ID NO: 143907 - protein, 10 aa, synthetic construct
DRSRGDVRTL

SEQ ID NO: 143908 - protein, 10 aa, synthetic construct
DRTRGDVRTL

SEQ ID NO: 143909 - protein, 10 aa, synthetic construct
DRYRGDVRTL

SEQ ID NO: 143910 - protein, 10 aa, synthetic construct
DRNRGDVRTL

SEQ ID NO: 143911 - protein, 10 aa, synthetic construct
DRQRGDVRTL

SEQ ID NO: 143912 - protein, 10 aa, synthetic construct
DRDRGDVRTL

SEQ ID NO: 143913 - protein, 10 aa, synthetic construct
DRERGDVRTL

SEQ ID NO: 143914 - protein, 10 aa, synthetic construct
DHGRGDVRTL

SEQ ID NO: 143915 - protein, 10 aa, synthetic construct
DHARGDVRTL

SEQ ID NO: 143916 - protein, 10 aa, synthetic construct
DHVRGDVRTL

SEQ ID NO: 143917 - protein, 10 aa, synthetic construct
DHPRGDVRTL

SEQ ID NO: 143918 - protein, 10 aa, synthetic construct
DHLRGDVRTL

SEQ ID NO: 143919 - protein, 10 aa, synthetic construct
DHIRGDVRTL

SEQ ID NO: 143920 - protein, 10 aa, synthetic construct
DHMRGDVRTL

SEQ ID NO: 143921 - protein, 10 aa, synthetic construct
DHWRGDVRTL

SEQ ID NO: 143922 - protein, 10 aa, synthetic construct
DHFRGDVRTL

SEQ ID NO: 143923 - protein, 10 aa, synthetic construct
DHKRGDVRTL

SEQ ID NO: 143924 - protein, 10 aa, synthetic construct
DHRRGDVRTL

SEQ ID NO: 143925 - protein, 10 aa, synthetic construct
DHHRGDVRTL

SEQ ID NO: 143926 - protein, 10 aa, synthetic construct
DHSRGDVRTL

SEQ ID NO: 143927 - protein, 10 aa, synthetic construct
DHTRGDVRTL

SEQ ID NO: 143928 - protein, 10 aa, synthetic construct
DHYRGDVRTL

SEQ ID NO: 143929 - protein, 10 aa, synthetic construct
DHNRGDVRTL

SEQ ID NO: 143930 - protein, 10 aa, synthetic construct
DHQRGDVRTL

SEQ ID NO: 143931 - protein, 10 aa, synthetic construct
DHDRGDVRTL

SEQ ID NO: 143932 - protein, 10 aa, synthetic construct
DHERGDVRTL

SEQ ID NO: 143933 - protein, 10 aa, synthetic construct
DSGRGDVRTL

SEQ ID NO: 143934 - protein, 10 aa, synthetic construct
DSARGDVRTL

SEQ ID NO: 143935 - protein, 10 aa, synthetic construct
DSVRGDVRTL

SEQ ID NO: 143936 - protein, 10 aa, synthetic construct
DSPRGDVRTL

SEQ ID NO: 143937 - protein, 10 aa, synthetic construct
DSLRGDVRTL

SEQ ID NO: 143938 - protein, 10 aa, synthetic construct
DSIRGDVRTL

SEQ ID NO: 143939 - protein, 10 aa, synthetic construct
DSMRGDVRTL

SEQ ID NO: 143940 - protein, 10 aa, synthetic construct
DSWRGDVRTL

SEQ ID NO: 143941 - protein, 10 aa, synthetic construct
DSFRGDVRTL

SEQ ID NO: 143942 - protein, 10 aa, synthetic construct
DSKRGDVRTL

SEQ ID NO: 143943 - protein, 10 aa, synthetic construct
DSRRGDVRTL

SEQ ID NO: 143944 - protein, 10 aa, synthetic construct
DSHRGDVRTL

SEQ ID NO: 143945 - protein, 10 aa, synthetic construct
DSSRGDVRTL

SEQ ID NO: 143946 - protein, 10 aa, synthetic construct
DSTRGDVRTL

SEQ ID NO: 143947 - protein, 10 aa, synthetic construct
DSYRGDVRTL

SEQ ID NO: 143948 - protein, 10 aa, synthetic construct
DSNRGDVRTL

SEQ ID NO: 143949 - protein, 10 aa, synthetic construct
DSQRGDVRTL

SEQ ID NO: 143950 - protein, 10 aa, synthetic construct
DSDRGDVRTL

SEQ ID NO: 143951 - protein, 10 aa, synthetic construct
DSERGDVRTL

SEQ ID NO: 143952 - protein, 10 aa, synthetic construct
DTGRGDVRTL

SEQ ID NO: 143953 - protein, 10 aa, synthetic construct
DTARGDVRTL

SEQ ID NO: 143954 - protein, 10 aa, synthetic construct
DTVRGDVRTL

SEQ ID NO: 143955 - protein, 10 aa, synthetic construct
DTPRGDVRTL

SEQ ID NO: 143956 - protein, 10 aa, synthetic construct
DTLRGDVRTL

SEQ ID NO: 143957 - protein, 10 aa, synthetic construct
DTIRGDVRTL

SEQ ID NO: 143958 - protein, 10 aa, synthetic construct
DTMRGDVRTL

SEQ ID NO: 143959 - protein, 10 aa, synthetic construct
DTWRGDVRTL

SEQ ID NO: 143960 - protein, 10 aa, synthetic construct
DTFRGDVRTL

SEQ ID NO: 143961 - protein, 10 aa, synthetic construct
DTKRGDVRTL

SEQ ID NO: 143962 - protein, 10 aa, synthetic construct
DTRRGDVRTL

SEQ ID NO: 143963 - protein, 10 aa, synthetic construct
DTHRGDVRTL

SEQ ID NO: 143964 - protein, 10 aa, synthetic construct
DTSRGDVRTL

SEQ ID NO: 143965 - protein, 10 aa, synthetic construct
DTTRGDVRTL

SEQ ID NO: 143966 - protein, 10 aa, synthetic construct
DTYRGDVRTL

SEQ ID NO: 143967 - protein, 10 aa, synthetic construct
DTNRGDVRTL

SEQ ID NO: 143968 - protein, 10 aa, synthetic construct
DTQRGDVRTL

SEQ ID NO: 143969 - protein, 10 aa, synthetic construct
DTDRGDVRTL

SEQ ID NO: 143970 - protein, 10 aa, synthetic construct
DTERGDVRTL

SEQ ID NO: 143971 - protein, 10 aa, synthetic construct
DYGRGDVRTL

SEQ ID NO: 143972 - protein, 10 aa, synthetic construct
DYARGDVRTL

SEQ ID NO: 143973 - protein, 10 aa, synthetic construct
DYVRGDVRTL

SEQ ID NO: 143974 - protein, 10 aa, synthetic construct
DYPRGDVRTL

SEQ ID NO: 143975 - protein, 10 aa, synthetic construct
DYLRGDVRTL

SEQ ID NO: 143976 - protein, 10 aa, synthetic construct
DYIRGDVRTL

SEQ ID NO: 143977 - protein, 10 aa, synthetic construct
DYMRGDVRTL

SEQ ID NO: 143978 - protein, 10 aa, synthetic construct
DYWRGDVRTL

SEQ ID NO: 143979 - protein, 10 aa, synthetic construct
DYFRGDVRTL

SEQ ID NO: 143980 - protein, 10 aa, synthetic construct
DYKRGDVRTL

SEQ ID NO: 143981 - protein, 10 aa, synthetic construct
DYRRGDVRTL

SEQ ID NO: 143982 - protein, 10 aa, synthetic construct
DYHRGDVRTL

SEQ ID NO: 143983 - protein, 10 aa, synthetic construct
DYSRGDVRTL

SEQ ID NO: 143984 - protein, 10 aa, synthetic construct
DYTRGDVRTL

SEQ ID NO: 143985 - protein, 10 aa, synthetic construct
DYYRGDVRTL

SEQ ID NO: 143986 - protein, 10 aa, synthetic construct
DYNRGDVRTL

SEQ ID NO: 143987 - protein, 10 aa, synthetic construct
DYQRGDVRTL

SEQ ID NO: 143988 - protein, 10 aa, synthetic construct
DYDRGDVRTL

SEQ ID NO: 143989 - protein, 10 aa, synthetic construct
DYERGDVRTL

SEQ ID NO: 143990 - protein, 10 aa, synthetic construct
DNGRGDVRTL

SEQ ID NO: 143991 - protein, 10 aa, synthetic construct
DNARGDVRTL

SEQ ID NO: 143992 - protein, 10 aa, synthetic construct
DNVRGDVRTL

SEQ ID NO: 143993 - protein, 10 aa, synthetic construct
DNPRGDVRTL

SEQ ID NO: 143994 - protein, 10 aa, synthetic construct
DNLRGDVRTL

SEQ ID NO: 143995 - protein, 10 aa, synthetic construct
DNIRGDVRTL

SEQ ID NO: 143996 - protein, 10 aa, synthetic construct
DNMRGDVRTL

SEQ ID NO: 143997 - protein, 10 aa, synthetic construct
DNWRGDVRTL

SEQ ID NO: 143998 - protein, 10 aa, synthetic construct
DNFRGDVRTL

SEQ ID NO: 143999 - protein, 10 aa, synthetic construct
DNKRGDVRTL

SEQ ID NO: 144000 - protein, 10 aa, synthetic construct
DNRRGDVRTL

SEQ ID NO: 144001 - protein, 10 aa, synthetic construct
DNHRGDVRTL

SEQ ID NO: 144002 - protein, 10 aa, synthetic construct
DNSRGDVRTL

SEQ ID NO: 144003 - protein, 10 aa, synthetic construct
DNTRGDVRTL

SEQ ID NO: 144004 - protein, 10 aa, synthetic construct
DNYRGDVRTL

SEQ ID NO: 144005 - protein, 10 aa, synthetic construct
DNNRGDVRTL

SEQ ID NO: 144006 - protein, 10 aa, synthetic construct
DNQRGDVRTL

SEQ ID NO: 144007 - protein, 10 aa, synthetic construct
DNDRGDVRTL

SEQ ID NO: 144008 - protein, 10 aa, synthetic construct
DNERGDVRTL

SEQ ID NO: 144009 - protein, 10 aa, synthetic construct
DQGRGDVRTL

SEQ ID NO: 144010 - protein, 10 aa, synthetic construct
DQARGDVRTL

SEQ ID NO: 144011 - protein, 10 aa, synthetic construct
DQVRGDVRTL

SEQ ID NO: 144012 - protein, 10 aa, synthetic construct
DQPRGDVRTL

SEQ ID NO: 144013 - protein, 10 aa, synthetic construct
DQLRGDVRTL

SEQ ID NO: 144014 - protein, 10 aa, synthetic construct
DQIRGDVRTL

SEQ ID NO: 144015 - protein, 10 aa, synthetic construct
DQMRGDVRTL

SEQ ID NO: 144016 - protein, 10 aa, synthetic construct
DQWRGDVRTL

SEQ ID NO: 144017 - protein, 10 aa, synthetic construct
DQFRGDVRTL

SEQ ID NO: 144018 - protein, 10 aa, synthetic construct
DQKRGDVRTL

SEQ ID NO: 144019 - protein, 10 aa, synthetic construct
DQRRGDVRTL

SEQ ID NO: 144020 - protein, 10 aa, synthetic construct
DQHRGDVRTL

SEQ ID NO: 144021 - protein, 10 aa, synthetic construct
DQSRGDVRTL

SEQ ID NO: 144022 - protein, 10 aa, synthetic construct
DQTRGDVRTL

SEQ ID NO: 144023 - protein, 10 aa, synthetic construct
DQYRGDVRTL

SEQ ID NO: 144024 - protein, 10 aa, synthetic construct
DQNRGDVRTL

SEQ ID NO: 144025 - protein, 10 aa, synthetic construct
DQQRGDVRTL

SEQ ID NO: 144026 - protein, 10 aa, synthetic construct
DQDRGDVRTL

SEQ ID NO: 144027 - protein, 10 aa, synthetic construct
DQERGDVRTL

SEQ ID NO: 144028 - protein, 10 aa, synthetic construct
DDGRGDVRTL

SEQ ID NO: 144029 - protein, 10 aa, synthetic construct
DDARGDVRTL

SEQ ID NO: 144030 - protein, 10 aa, synthetic construct
DDVRGDVRTL

SEQ ID NO: 144031 - protein, 10 aa, synthetic construct
DDPRGDVRTL

SEQ ID NO: 144032 - protein, 10 aa, synthetic construct
DDLRGDVRTL

SEQ ID NO: 144033 - protein, 10 aa, synthetic construct
DDIRGDVRTL

SEQ ID NO: 144034 - protein, 10 aa, synthetic construct
DDMRGDVRTL

SEQ ID NO: 144035 - protein, 10 aa, synthetic construct
DDWRGDVRTL

SEQ ID NO: 144036 - protein, 10 aa, synthetic construct
DDFRGDVRTL

SEQ ID NO: 144037 - protein, 10 aa, synthetic construct
DDKRGDVRTL

SEQ ID NO: 144038 - protein, 10 aa, synthetic construct
DDRRGDVRTL

SEQ ID NO: 144039 - protein, 10 aa, synthetic construct
DDHRGDVRTL

SEQ ID NO: 144040 - protein, 10 aa, synthetic construct
DDSRGDVRTL

SEQ ID NO: 144041 - protein, 10 aa, synthetic construct
DDTRGDVRTL

SEQ ID NO: 144042 - protein, 10 aa, synthetic construct
DDYRGDVRTL

SEQ ID NO: 144043 - protein, 10 aa, synthetic construct
DDNRGDVRTL

SEQ ID NO: 144044 - protein, 10 aa, synthetic construct
DDQRGDVRTL

SEQ ID NO: 144045 - protein, 10 aa, synthetic construct
DDDRGDVRTL

SEQ ID NO: 144046 - protein, 10 aa, synthetic construct
DDERGDVRTL

SEQ ID NO: 144047 - protein, 10 aa, synthetic construct
DEGRGDVRTL

SEQ ID NO: 144048 - protein, 10 aa, synthetic construct
DEARGDVRTL

SEQ ID NO: 144049 - protein, 10 aa, synthetic construct
DEVRGDVRTL

SEQ ID NO: 144050 - protein, 10 aa, synthetic construct
DEPRGDVRTL

SEQ ID NO: 144051 - protein, 10 aa, synthetic construct
DELRGDVRTL

SEQ ID NO: 144052 - protein, 10 aa, synthetic construct
DEIRGDVRTL

SEQ ID NO: 144053 - protein, 10 aa, synthetic construct
DEMRGDVRTL

SEQ ID NO: 144054 - protein, 10 aa, synthetic construct
DEWRGDVRTL

SEQ ID NO: 144055 - protein, 10 aa, synthetic construct
DEFRGDVRTL

SEQ ID NO: 144056 - protein, 10 aa, synthetic construct
DEKRGDVRTL

SEQ ID NO: 144057 - protein, 10 aa, synthetic construct
DERRGDVRTL

SEQ ID NO: 144058 - protein, 10 aa, synthetic construct
DEHRGDVRTL

SEQ ID NO: 144059 - protein, 10 aa, synthetic construct
DESRGDVRTL

SEQ ID NO: 144060 - protein, 10 aa, synthetic construct
DETRGDVRTL

SEQ ID NO: 144061 - protein, 10 aa, synthetic construct
DEYRGDVRTL

SEQ ID NO: 144062 - protein, 10 aa, synthetic construct
DENRGDVRTL

SEQ ID NO: 144063 - protein, 10 aa, synthetic construct
DEQRGDVRTL

SEQ ID NO: 144064 - protein, 10 aa, synthetic construct
DEDRGDVRTL

SEQ ID NO: 144065 - protein, 10 aa, synthetic construct
DEERGDVRTL

SEQ ID NO: 144066 - protein, 10 aa, synthetic construct
QGGRGDVRTL

SEQ ID NO: 144067 - protein, 10 aa, synthetic construct
QGARGDVRTL

SEQ ID NO: 144068 - protein, 10 aa, synthetic construct
QGVRGDVRTL

SEQ ID NO: 144069 - protein, 10 aa, synthetic construct
QGPRGDVRTL

SEQ ID NO: 144070 - protein, 10 aa, synthetic construct
QGLRGDVRTL

SEQ ID NO: 144071 - protein, 10 aa, synthetic construct
QGIRGDVRTL

SEQ ID NO: 144072 - protein, 10 aa, synthetic construct
QGMRGDVRTL

SEQ ID NO: 144073 - protein, 10 aa, synthetic construct
QGWRGDVRTL

SEQ ID NO: 144074 - protein, 10 aa, synthetic construct
QGFRGDVRTL

SEQ ID NO: 144075 - protein, 10 aa, synthetic construct
QGKRGDVRTL

SEQ ID NO: 144076 - protein, 10 aa, synthetic construct
QGRRGDVRTL

SEQ ID NO: 144077 - protein, 10 aa, synthetic construct
QGHRGDVRTL

SEQ ID NO: 144078 - protein, 10 aa, synthetic construct
QGSRGDVRTL

SEQ ID NO: 144079 - protein, 10 aa, synthetic construct
QGTRGDVRTL

SEQ ID NO: 144080 - protein, 10 aa, synthetic construct
QGYRGDVRTL

SEQ ID NO: 144081 - protein, 10 aa, synthetic construct
QGNRGDVRTL

SEQ ID NO: 144082 - protein, 10 aa, synthetic construct
QGQRGDVRTL

SEQ ID NO: 144083 - protein, 10 aa, synthetic construct
QGDRGDVRTL

SEQ ID NO: 144084 - protein, 10 aa, synthetic construct
QGERGDVRTL

SEQ ID NO: 144085 - protein, 10 aa, synthetic construct
QAGRGDVRTL

SEQ ID NO: 144086 - protein, 10 aa, synthetic construct
QAARGDVRTL

SEQ ID NO: 144087 - protein, 10 aa, synthetic construct
QAVRGDVRTL

SEQ ID NO: 144088 - protein, 10 aa, synthetic construct
QAPRGDVRTL

SEQ ID NO: 144089 - protein, 10 aa, synthetic construct
QALRGDVRTL

SEQ ID NO: 144090 - protein, 10 aa, synthetic construct
QAIRGDVRTL

SEQ ID NO: 144091 - protein, 10 aa, synthetic construct
QAMRGDVRTL

SEQ ID NO: 144092 - protein, 10 aa, synthetic construct
QAWRGDVRTL

SEQ ID NO: 144093 - protein, 10 aa, synthetic construct
QAFRGDVRTL

SEQ ID NO: 144094 - protein, 10 aa, synthetic construct
QAKRGDVRTL

SEQ ID NO: 144095 - protein, 10 aa, synthetic construct
QARRGDVRTL

SEQ ID NO: 144096 - protein, 10 aa, synthetic construct
QAHRGDVRTL

SEQ ID NO: 144097 - protein, 10 aa, synthetic construct
QASRGDVRTL

SEQ ID NO: 144098 - protein, 10 aa, synthetic construct
QATRGDVRTL

SEQ ID NO: 144099 - protein, 10 aa, synthetic construct
QAYRGDVRTL

SEQ ID NO: 144100 - protein, 10 aa, synthetic construct
QANRGDVRTL

SEQ ID NO: 144101 - protein, 10 aa, synthetic construct
QAQRGDVRTL

SEQ ID NO: 144102 - protein, 10 aa, synthetic construct
QADRGDVRTL

SEQ ID NO: 144103 - protein, 10 aa, synthetic construct
QAERGDVRTL

SEQ ID NO: 144104 - protein, 10 aa, synthetic construct
QVGRGDVRTL

SEQ ID NO: 144105 - protein, 10 aa, synthetic construct
QVARGDVRTL

SEQ ID NO: 144106 - protein, 10 aa, synthetic construct
QVVRGDVRTL

SEQ ID NO: 144107 - protein, 10 aa, synthetic construct
QVPRGDVRTL

SEQ ID NO: 144108 - protein, 10 aa, synthetic construct
QVLRGDVRTL

SEQ ID NO: 144109 - protein, 10 aa, synthetic construct
QVIRGDVRTL

SEQ ID NO: 144110 - protein, 10 aa, synthetic construct
QVMRGDVRTL

SEQ ID NO: 144111 - protein, 10 aa, synthetic construct
QVWRGDVRTL

SEQ ID NO: 144112 - protein, 10 aa, synthetic construct
QVFRGDVRTL

SEQ ID NO: 144113 - protein, 10 aa, synthetic construct
QVKRGDVRTL

SEQ ID NO: 144114 - protein, 10 aa, synthetic construct
QVRRGDVRTL

SEQ ID NO: 144115 - protein, 10 aa, synthetic construct
QVHRGDVRTL

SEQ ID NO: 144116 - protein, 10 aa, synthetic construct
QVSRGDVRTL

SEQ ID NO: 144117 - protein, 10 aa, synthetic construct
QVTRGDVRTL

SEQ ID NO: 144118 - protein, 10 aa, synthetic construct
QVYRGDVRTL

SEQ ID NO: 144119 - protein, 10 aa, synthetic construct
QVNRGDVRTL

SEQ ID NO: 144120 - protein, 10 aa, synthetic construct
QVQRGDVRTL

SEQ ID NO: 144121 - protein, 10 aa, synthetic construct
QVDRGDVRTL

SEQ ID NO: 144122 - protein, 10 aa, synthetic construct
QVERGDVRTL

SEQ ID NO: 144123 - protein, 10 aa, synthetic construct
QPGRGDVRTL

SEQ ID NO: 144124 - protein, 10 aa, synthetic construct
QPARGDVRTL

SEQ ID NO: 144125 - protein, 10 aa, synthetic construct
QPVRGDVRTL

SEQ ID NO: 144126 - protein, 10 aa, synthetic construct
QPPRGDVRTL

SEQ ID NO: 144127 - protein, 10 aa, synthetic construct
QPLRGDVRTL

SEQ ID NO: 144128 - protein, 10 aa, synthetic construct
QPIRGDVRTL

SEQ ID NO: 144129 - protein, 10 aa, synthetic construct
QPMRGDVRTL

SEQ ID NO: 144130 - protein, 10 aa, synthetic construct
QPWRGDVRTL

SEQ ID NO: 144131 - protein, 10 aa, synthetic construct
QPFRGDVRTL

SEQ ID NO: 144132 - protein, 10 aa, synthetic construct
QPKRGDVRTL

SEQ ID NO: 144133 - protein, 10 aa, synthetic construct
QPRRGDVRTL

SEQ ID NO: 144134 - protein, 10 aa, synthetic construct
QPHRGDVRTL

SEQ ID NO: 144135 - protein, 10 aa, synthetic construct
QPSRGDVRTL

SEQ ID NO: 144136 - protein, 10 aa, synthetic construct
QPTRGDVRTL

SEQ ID NO: 144137 - protein, 10 aa, synthetic construct
QPYRGDVRTL

SEQ ID NO: 144138 - protein, 10 aa, synthetic construct
QPNRGDVRTL

SEQ ID NO: 144139 - protein, 10 aa, synthetic construct
QPQRGDVRTL

SEQ ID NO: 144140 - protein, 10 aa, synthetic construct
QPDRGDVRTL

SEQ ID NO: 144141 - protein, 10 aa, synthetic construct
QPERGDVRTL

SEQ ID NO: 144142 - protein, 10 aa, synthetic construct
QLGRGDVRTL

SEQ ID NO: 144143 - protein, 10 aa, synthetic construct
QLARGDVRTL

SEQ ID NO: 144144 - protein, 10 aa, synthetic construct
QLVRGDVRTL

SEQ ID NO: 144145 - protein, 10 aa, synthetic construct
QLPRGDVRTL

SEQ ID NO: 144146 - protein, 10 aa, synthetic construct
QLLRGDVRTL

SEQ ID NO: 144147 - protein, 10 aa, synthetic construct
QLIRGDVRTL

SEQ ID NO: 144148 - protein, 10 aa, synthetic construct
QLMRGDVRTL

SEQ ID NO: 144149 - protein, 10 aa, synthetic construct
QLWRGDVRTL

SEQ ID NO: 144150 - protein, 10 aa, synthetic construct
QLFRGDVRTL

SEQ ID NO: 144151 - protein, 10 aa, synthetic construct
QLKRGDVRTL

SEQ ID NO: 144152 - protein, 10 aa, synthetic construct
QLRRGDVRTL

SEQ ID NO: 144153 - protein, 10 aa, synthetic construct
QLHRGDVRTL

SEQ ID NO: 144154 - protein, 10 aa, synthetic construct
QLSRGDVRTL

SEQ ID NO: 144155 - protein, 10 aa, synthetic construct
QLTRGDVRTL

SEQ ID NO: 144156 - protein, 10 aa, synthetic construct
QLYRGDVRTL

SEQ ID NO: 144157 - protein, 10 aa, synthetic construct
QLNRGDVRTL

SEQ ID NO: 144158 - protein, 10 aa, synthetic construct
QLQRGDVRTL

SEQ ID NO: 144159 - protein, 10 aa, synthetic construct
QLDRGDVRTL

SEQ ID NO: 144160 - protein, 10 aa, synthetic construct
QLERGDVRTL

SEQ ID NO: 144161 - protein, 10 aa, synthetic construct
QIGRGDVRTL

SEQ ID NO: 144162 - protein, 10 aa, synthetic construct
QIARGDVRTL

SEQ ID NO: 144163 - protein, 10 aa, synthetic construct
QIVRGDVRTL

SEQ ID NO: 144164 - protein, 10 aa, synthetic construct
QIPRGDVRTL

SEQ ID NO: 144165 - protein, 10 aa, synthetic construct
QILRGDVRTL

SEQ ID NO: 144166 - protein, 10 aa, synthetic construct
QIIRGDVRTL

SEQ ID NO: 144167 - protein, 10 aa, synthetic construct
QIMRGDVRTL

SEQ ID NO: 144168 - protein, 10 aa, synthetic construct
QIWRGDVRTL

SEQ ID NO: 144169 - protein, 10 aa, synthetic construct
QIFRGDVRTL

SEQ ID NO: 144170 - protein, 10 aa, synthetic construct
QIKRGDVRTL

SEQ ID NO: 144171 - protein, 10 aa, synthetic construct
QIRRGDVRTL

SEQ ID NO: 144172 - protein, 10 aa, synthetic construct
QIHRGDVRTL

SEQ ID NO: 144173 - protein, 10 aa, synthetic construct
QISRGDVRTL

SEQ ID NO: 144174 - protein, 10 aa, synthetic construct
QITRGDVRTL

SEQ ID NO: 144175 - protein, 10 aa, synthetic construct
QIYRGDVRTL

SEQ ID NO: 144176 - protein, 10 aa, synthetic construct
QINRGDVRTL

SEQ ID NO: 144177 - protein, 10 aa, synthetic construct
QIQRGDVRTL

SEQ ID NO: 144178 - protein, 10 aa, synthetic construct
QIDRGDVRTL

SEQ ID NO: 144179 - protein, 10 aa, synthetic construct
QIERGDVRTL

SEQ ID NO: 144180 - protein, 10 aa, synthetic construct
QMGRGDVRTL

SEQ ID NO: 144181 - protein, 10 aa, synthetic construct
QMARGDVRTL

SEQ ID NO: 144182 - protein, 10 aa, synthetic construct
QMVRGDVRTL

SEQ ID NO: 144183 - protein, 10 aa, synthetic construct
QMPRGDVRTL

SEQ ID NO: 144184 - protein, 10 aa, synthetic construct
QMLRGDVRTL

SEQ ID NO: 144185 - protein, 10 aa, synthetic construct
QMIRGDVRTL

SEQ ID NO: 144186 - protein, 10 aa, synthetic construct
QMMRGDVRTL

SEQ ID NO: 144187 - protein, 10 aa, synthetic construct
QMWRGDVRTL

SEQ ID NO: 144188 - protein, 10 aa, synthetic construct
QMFRGDVRTL

SEQ ID NO: 144189 - protein, 10 aa, synthetic construct
QMKRGDVRTL

SEQ ID NO: 144190 - protein, 10 aa, synthetic construct
QMRRGDVRTL

SEQ ID NO: 144191 - protein, 10 aa, synthetic construct
QMHRGDVRTL

SEQ ID NO: 144192 - protein, 10 aa, synthetic construct
QMSRGDVRTL

SEQ ID NO: 144193 - protein, 10 aa, synthetic construct
QMTRGDVRTL

SEQ ID NO: 144194 - protein, 10 aa, synthetic construct
QMYRGDVRTL

SEQ ID NO: 144195 - protein, 10 aa, synthetic construct
QMNRGDVRTL

SEQ ID NO: 144196 - protein, 10 aa, synthetic construct
QMQRGDVRTL

SEQ ID NO: 144197 - protein, 10 aa, synthetic construct
QMDRGDVRTL

SEQ ID NO: 144198 - protein, 10 aa, synthetic construct
QMERGDVRTL

SEQ ID NO: 144199 - protein, 10 aa, synthetic construct
QWGRGDVRTL

SEQ ID NO: 144200 - protein, 10 aa, synthetic construct
QWARGDVRTL

SEQ ID NO: 144201 - protein, 10 aa, synthetic construct
QWVRGDVRTL

SEQ ID NO: 144202 - protein, 10 aa, synthetic construct
QWPRGDVRTL

SEQ ID NO: 144203 - protein, 10 aa, synthetic construct
QWLRGDVRTL

SEQ ID NO: 144204 - protein, 10 aa, synthetic construct
QWIRGDVRTL

SEQ ID NO: 144205 - protein, 10 aa, synthetic construct
QWMRGDVRTL

SEQ ID NO: 144206 - protein, 10 aa, synthetic construct
QWWRGDVRTL

SEQ ID NO: 144207 - protein, 10 aa, synthetic construct
QWFRGDVRTL

SEQ ID NO: 144208 - protein, 10 aa, synthetic construct
QWKRGDVRTL

SEQ ID NO: 144209 - protein, 10 aa, synthetic construct
QWRRGDVRTL

SEQ ID NO: 144210 - protein, 10 aa, synthetic construct
QWHRGDVRTL

SEQ ID NO: 144211 - protein, 10 aa, synthetic construct
QWSRGDVRTL

SEQ ID NO: 144212 - protein, 10 aa, synthetic construct
QWTRGDVRTL

SEQ ID NO: 144213 - protein, 10 aa, synthetic construct
QWYRGDVRTL

SEQ ID NO: 144214 - protein, 10 aa, synthetic construct
QWNRGDVRTL

SEQ ID NO: 144215 - protein, 10 aa, synthetic construct
QWQRGDVRTL

SEQ ID NO: 144216 - protein, 10 aa, synthetic construct
QWDRGDVRTL

SEQ ID NO: 144217 - protein, 10 aa, synthetic construct
QWERGDVRTL

SEQ ID NO: 144218 - protein, 10 aa, synthetic construct
QFGRGDVRTL

SEQ ID NO: 144219 - protein, 10 aa, synthetic construct
QFARGDVRTL

SEQ ID NO: 144220 - protein, 10 aa, synthetic construct
QFVRGDVRTL

SEQ ID NO: 144221 - protein, 10 aa, synthetic construct
QFPRGDVRTL

SEQ ID NO: 144222 - protein, 10 aa, synthetic construct
QFLRGDVRTL

SEQ ID NO: 144223 - protein, 10 aa, synthetic construct
QFIRGDVRTL

SEQ ID NO: 144224 - protein, 10 aa, synthetic construct
QFMRGDVRTL

SEQ ID NO: 144225 - protein, 10 aa, synthetic construct
QFWRGDVRTL

SEQ ID NO: 144226 - protein, 10 aa, synthetic construct
QFFRGDVRTL

SEQ ID NO: 144227 - protein, 10 aa, synthetic construct
QFKRGDVRTL

SEQ ID NO: 144228 - protein, 10 aa, synthetic construct
QFRRGDVRTL

SEQ ID NO: 144229 - protein, 10 aa, synthetic construct
QFHRGDVRTL

SEQ ID NO: 144230 - protein, 10 aa, synthetic construct
QFSRGDVRTL

SEQ ID NO: 144231 - protein, 10 aa, synthetic construct
QFTRGDVRTL

SEQ ID NO: 144232 - protein, 10 aa, synthetic construct
QFYRGDVRTL

SEQ ID NO: 144233 - protein, 10 aa, synthetic construct
QFNRGDVRTL

SEQ ID NO: 144234 - protein, 10 aa, synthetic construct
QFQRGDVRTL

SEQ ID NO: 144235 - protein, 10 aa, synthetic construct
QFDRGDVRTL

SEQ ID NO: 144236 - protein, 10 aa, synthetic construct
QFERGDVRTL

SEQ ID NO: 144237 - protein, 10 aa, synthetic construct
QKGRGDVRTL

SEQ ID NO: 144238 - protein, 10 aa, synthetic construct
QKARGDVRTL

SEQ ID NO: 144239 - protein, 10 aa, synthetic construct
QKVRGDVRTL

SEQ ID NO: 144240 - protein, 10 aa, synthetic construct
QKPRGDVRTL

SEQ ID NO: 144241 - protein, 10 aa, synthetic construct
QKLRGDVRTL

SEQ ID NO: 144242 - protein, 10 aa, synthetic construct
QKIRGDVRTL

SEQ ID NO: 144243 - protein, 10 aa, synthetic construct
QKMRGDVRTL

SEQ ID NO: 144244 - protein, 10 aa, synthetic construct
QKWRGDVRTL

SEQ ID NO: 144245 - protein, 10 aa, synthetic construct
QKFRGDVRTL

SEQ ID NO: 144246 - protein, 10 aa, synthetic construct
QKKRGDVRTL

SEQ ID NO: 144247 - protein, 10 aa, synthetic construct
QKRRGDVRTL

SEQ ID NO: 144248 - protein, 10 aa, synthetic construct
QKHRGDVRTL

SEQ ID NO: 144249 - protein, 10 aa, synthetic construct
QKSRGDVRTL

SEQ ID NO: 144250 - protein, 10 aa, synthetic construct
QKTRGDVRTL

SEQ ID NO: 144251 - protein, 10 aa, synthetic construct
QKYRGDVRTL

SEQ ID NO: 144252 - protein, 10 aa, synthetic construct
QKNRGDVRTL

SEQ ID NO: 144253 - protein, 10 aa, synthetic construct
QKQRGDVRTL

SEQ ID NO: 144254 - protein, 10 aa, synthetic construct
QKDRGDVRTL

SEQ ID NO: 144255 - protein, 10 aa, synthetic construct
QKERGDVRTL

SEQ ID NO: 144256 - protein, 10 aa, synthetic construct
QRGRGDVRTL

SEQ ID NO: 144257 - protein, 10 aa, synthetic construct
QRARGDVRTL

SEQ ID NO: 144258 - protein, 10 aa, synthetic construct
QRVRGDVRTL

SEQ ID NO: 144259 - protein, 10 aa, synthetic construct
QRPRGDVRTL

SEQ ID NO: 144260 - protein, 10 aa, synthetic construct
QRLRGDVRTL

SEQ ID NO: 144261 - protein, 10 aa, synthetic construct
QRIRGDVRTL

SEQ ID NO: 144262 - protein, 10 aa, synthetic construct
QRMRGDVRTL

SEQ ID NO: 144263 - protein, 10 aa, synthetic construct
QRWRGDVRTL

SEQ ID NO: 144264 - protein, 10 aa, synthetic construct
QRFRGDVRTL

SEQ ID NO: 144265 - protein, 10 aa, synthetic construct
QRKRGDVRTL

SEQ ID NO: 144266 - protein, 10 aa, synthetic construct
QRRRGDVRTL

SEQ ID NO: 144267 - protein, 10 aa, synthetic construct
QRHRGDVRTL

SEQ ID NO: 144268 - protein, 10 aa, synthetic construct
QRSRGDVRTL

SEQ ID NO: 144269 - protein, 10 aa, synthetic construct
QRTRGDVRTL

SEQ ID NO: 144270 - protein, 10 aa, synthetic construct
QRYRGDVRTL

SEQ ID NO: 144271 - protein, 10 aa, synthetic construct
QRNRGDVRTL

SEQ ID NO: 144272 - protein, 10 aa, synthetic construct
QRQRGDVRTL

SEQ ID NO: 144273 - protein, 10 aa, synthetic construct
QRDRGDVRTL

SEQ ID NO: 144274 - protein, 10 aa, synthetic construct
QRERGDVRTL

SEQ ID NO: 144275 - protein, 10 aa, synthetic construct
QHGRGDVRTL

SEQ ID NO: 144276 - protein, 10 aa, synthetic construct
QHARGDVRTL

SEQ ID NO: 144277 - protein, 10 aa, synthetic construct
QHVRGDVRTL

SEQ ID NO: 144278 - protein, 10 aa, synthetic construct
QHPRGDVRTL

SEQ ID NO: 144279 - protein, 10 aa, synthetic construct
QHLRGDVRTL

SEQ ID NO: 144280 - protein, 10 aa, synthetic construct
QHIRGDVRTL

SEQ ID NO: 144281 - protein, 10 aa, synthetic construct
QHMRGDVRTL

SEQ ID NO: 144282 - protein, 10 aa, synthetic construct
QHWRGDVRTL

SEQ ID NO: 144283 - protein, 10 aa, synthetic construct
QHFRGDVRTL

SEQ ID NO: 144284 - protein, 10 aa, synthetic construct
QHKRGDVRTL

SEQ ID NO: 144285 - protein, 10 aa, synthetic construct
QHRRGDVRTL

SEQ ID NO: 144286 - protein, 10 aa, synthetic construct
QHHRGDVRTL

SEQ ID NO: 144287 - protein, 10 aa, synthetic construct
QHSRGDVRTL

SEQ ID NO: 144288 - protein, 10 aa, synthetic construct
QHTRGDVRTL

SEQ ID NO: 144289 - protein, 10 aa, synthetic construct
QHYRGDVRTL

SEQ ID NO: 144290 - protein, 10 aa, synthetic construct
QHNRGDVRTL

SEQ ID NO: 144291 - protein, 10 aa, synthetic construct
QHQRGDVRTL

SEQ ID NO: 144292 - protein, 10 aa, synthetic construct
QHDRGDVRTL

SEQ ID NO: 144293 - protein, 10 aa, synthetic construct
QHERGDVRTL

SEQ ID NO: 144294 - protein, 10 aa, synthetic construct
QSGRGDVRTL

SEQ ID NO: 144295 - protein, 10 aa, synthetic construct
QSARGDVRTL

SEQ ID NO: 144296 - protein, 10 aa, synthetic construct
QSVRGDVRTL

SEQ ID NO: 144297 - protein, 10 aa, synthetic construct
QSPRGDVRTL

SEQ ID NO: 144298 - protein, 10 aa, synthetic construct
QSLRGDVRTL

SEQ ID NO: 144299 - protein, 10 aa, synthetic construct
QSIRGDVRTL

SEQ ID NO: 144300 - protein, 10 aa, synthetic construct
QSMRGDVRTL

SEQ ID NO: 144301 - protein, 10 aa, synthetic construct
QSWRGDVRTL

SEQ ID NO: 144302 - protein, 10 aa, synthetic construct
QSFRGDVRTL

SEQ ID NO: 144303 - protein, 10 aa, synthetic construct
QSKRGDVRTL

SEQ ID NO: 144304 - protein, 10 aa, synthetic construct
QSRRGDVRTL

SEQ ID NO: 144305 - protein, 10 aa, synthetic construct
QSHRGDVRTL

SEQ ID NO: 144306 - protein, 10 aa, synthetic construct
QSSRGDVRTL

SEQ ID NO: 144307 - protein, 10 aa, synthetic construct
QSTRGDVRTL

SEQ ID NO: 144308 - protein, 10 aa, synthetic construct
QSYRGDVRTL

SEQ ID NO: 144309 - protein, 10 aa, synthetic construct
QSNRGDVRTL

SEQ ID NO: 144310 - protein, 10 aa, synthetic construct
QSQRGDVRTL

SEQ ID NO: 144311 - protein, 10 aa, synthetic construct
QSDRGDVRTL

SEQ ID NO: 144312 - protein, 10 aa, synthetic construct
QSERGDVRTL

SEQ ID NO: 144313 - protein, 10 aa, synthetic construct
QTGRGDVRTL

SEQ ID NO: 144314 - protein, 10 aa, synthetic construct
QTARGDVRTL

SEQ ID NO: 144315 - protein, 10 aa, synthetic construct
QTVRGDVRTL

SEQ ID NO: 144316 - protein, 10 aa, synthetic construct
QTPRGDVRTL

SEQ ID NO: 144317 - protein, 10 aa, synthetic construct
QTLRGDVRTL

SEQ ID NO: 144318 - protein, 10 aa, synthetic construct
QTIRGDVRTL

SEQ ID NO: 144319 - protein, 10 aa, synthetic construct
QTMRGDVRTL

SEQ ID NO: 144320 - protein, 10 aa, synthetic construct
QTWRGDVRTL

SEQ ID NO: 144321 - protein, 10 aa, synthetic construct
QTFRGDVRTL

SEQ ID NO: 144322 - protein, 10 aa, synthetic construct
QTKRGDVRTL

SEQ ID NO: 144323 - protein, 10 aa, synthetic construct
QTRRGDVRTL

SEQ ID NO: 144324 - protein, 10 aa, synthetic construct
QTHRGDVRTL

SEQ ID NO: 144325 - protein, 10 aa, synthetic construct
QTSRGDVRTL

SEQ ID NO: 144326 - protein, 10 aa, synthetic construct
QTTRGDVRTL

SEQ ID NO: 144327 - protein, 10 aa, synthetic construct
QTYRGDVRTL

SEQ ID NO: 144328 - protein, 10 aa, synthetic construct
QTNRGDVRTL

SEQ ID NO: 144329 - protein, 10 aa, synthetic construct
QTQRGDVRTL

SEQ ID NO: 144330 - protein, 10 aa, synthetic construct
QTDRGDVRTL

SEQ ID NO: 144331 - protein, 10 aa, synthetic construct
QTERGDVRTL

SEQ ID NO: 144332 - protein, 10 aa, synthetic construct
QYGRGDVRTL

SEQ ID NO: 144333 - protein, 10 aa, synthetic construct
QYARGDVRTL

SEQ ID NO: 144334 - protein, 10 aa, synthetic construct
QYVRGDVRTL

SEQ ID NO: 144335 - protein, 10 aa, synthetic construct
QYPRGDVRTL

SEQ ID NO: 144336 - protein, 10 aa, synthetic construct
QYLRGDVRTL

SEQ ID NO: 144337 - protein, 10 aa, synthetic construct
QYIRGDVRTL

SEQ ID NO: 144338 - protein, 10 aa, synthetic construct
QYMRGDVRTL

SEQ ID NO: 144339 - protein, 10 aa, synthetic construct
QYWRGDVRTL

SEQ ID NO: 144340 - protein, 10 aa, synthetic construct
QYFRGDVRTL

SEQ ID NO: 144341 - protein, 10 aa, synthetic construct
QYKRGDVRTL

SEQ ID NO: 144342 - protein, 10 aa, synthetic construct
QYRRGDVRTL

SEQ ID NO: 144343 - protein, 10 aa, synthetic construct
QYHRGDVRTL

SEQ ID NO: 144344 - protein, 10 aa, synthetic construct
QYSRGDVRTL

SEQ ID NO: 144345 - protein, 10 aa, synthetic construct
QYTRGDVRTL

SEQ ID NO: 144346 - protein, 10 aa, synthetic construct
QYYRGDVRTL

SEQ ID NO: 144347 - protein, 10 aa, synthetic construct
QYNRGDVRTL

SEQ ID NO: 144348 - protein, 10 aa, synthetic construct
QYQRGDVRTL

SEQ ID NO: 144349 - protein, 10 aa, synthetic construct
QYDRGDVRTL

SEQ ID NO: 144350 - protein, 10 aa, synthetic construct
QYERGDVRTL

SEQ ID NO: 144351 - protein, 10 aa, synthetic construct
QNGRGDVRTL

SEQ ID NO: 144352 - protein, 10 aa, synthetic construct
QNARGDVRTL

SEQ ID NO: 144353 - protein, 10 aa, synthetic construct
QNVRGDVRTL

SEQ ID NO: 144354 - protein, 10 aa, synthetic construct
QNPRGDVRTL

SEQ ID NO: 144355 - protein, 10 aa, synthetic construct
QNLRGDVRTL

SEQ ID NO: 144356 - protein, 10 aa, synthetic construct
QNIRGDVRTL

SEQ ID NO: 144357 - protein, 10 aa, synthetic construct
QNMRGDVRTL

SEQ ID NO: 144358 - protein, 10 aa, synthetic construct
QNWRGDVRTL

SEQ ID NO: 144359 - protein, 10 aa, synthetic construct
QNFRGDVRTL

SEQ ID NO: 144360 - protein, 10 aa, synthetic construct
QNKRGDVRTL

SEQ ID NO: 144361 - protein, 10 aa, synthetic construct
QNRRGDVRTL

SEQ ID NO: 144362 - protein, 10 aa, synthetic construct
QNHRGDVRTL

SEQ ID NO: 144363 - protein, 10 aa, synthetic construct
QNSRGDVRTL

SEQ ID NO: 144364 - protein, 10 aa, synthetic construct
QNTRGDVRTL

SEQ ID NO: 144365 - protein, 10 aa, synthetic construct
QNYRGDVRTL

SEQ ID NO: 144366 - protein, 10 aa, synthetic construct
QNNRGDVRTL

SEQ ID NO: 144367 - protein, 10 aa, synthetic construct
QNQRGDVRTL

SEQ ID NO: 144368 - protein, 10 aa, synthetic construct
QNDRGDVRTL

SEQ ID NO: 144369 - protein, 10 aa, synthetic construct
QNERGDVRTL

SEQ ID NO: 144370 - protein, 10 aa, synthetic construct
QQGRGDVRTL

SEQ ID NO: 144371 - protein, 10 aa, synthetic construct
QQARGDVRTL

SEQ ID NO: 144372 - protein, 10 aa, synthetic construct
QQVRGDVRTL

SEQ ID NO: 144373 - protein, 10 aa, synthetic construct
QQPRGDVRTL

SEQ ID NO: 144374 - protein, 10 aa, synthetic construct
QQLRGDVRTL

SEQ ID NO: 144375 - protein, 10 aa, synthetic construct
QQIRGDVRTL

SEQ ID NO: 144376 - protein, 10 aa, synthetic construct
QQMRGDVRTL

SEQ ID NO: 144377 - protein, 10 aa, synthetic construct
QQWRGDVRTL

SEQ ID NO: 144378 - protein, 10 aa, synthetic construct
QQFRGDVRTL

SEQ ID NO: 144379 - protein, 10 aa, synthetic construct
QQKRGDVRTL

SEQ ID NO: 144380 - protein, 10 aa, synthetic construct
QQRRGDVRTL

SEQ ID NO: 144381 - protein, 10 aa, synthetic construct
QQHRGDVRTL

SEQ ID NO: 144382 - protein, 10 aa, synthetic construct
QQSRGDVRTL

SEQ ID NO: 144383 - protein, 10 aa, synthetic construct
QQTRGDVRTL

SEQ ID NO: 144384 - protein, 10 aa, synthetic construct
QQYRGDVRTL

SEQ ID NO: 144385 - protein, 10 aa, synthetic construct
QQNRGDVRTL

SEQ ID NO: 144386 - protein, 10 aa, synthetic construct
QQQRGDVRTL

SEQ ID NO: 144387 - protein, 10 aa, synthetic construct
QQDRGDVRTL

SEQ ID NO: 144388 - protein, 10 aa, synthetic construct
QQERGDVRTL

SEQ ID NO: 144389 - protein, 10 aa, synthetic construct
QDGRGDVRTL

SEQ ID NO: 144390 - protein, 10 aa, synthetic construct
QDARGDVRTL

SEQ ID NO: 144391 - protein, 10 aa, synthetic construct
QDVRGDVRTL

SEQ ID NO: 144392 - protein, 10 aa, synthetic construct
QDPRGDVRTL

SEQ ID NO: 144393 - protein, 10 aa, synthetic construct
QDLRGDVRTL

SEQ ID NO: 144394 - protein, 10 aa, synthetic construct
QDIRGDVRTL

SEQ ID NO: 144395 - protein, 10 aa, synthetic construct
QDMRGDVRTL

SEQ ID NO: 144396 - protein, 10 aa, synthetic construct
QDWRGDVRTL

SEQ ID NO: 144397 - protein, 10 aa, synthetic construct
QDFRGDVRTL

SEQ ID NO: 144398 - protein, 10 aa, synthetic construct
QDKRGDVRTL

SEQ ID NO: 144399 - protein, 10 aa, synthetic construct
QDRRGDVRTL

SEQ ID NO: 144400 - protein, 10 aa, synthetic construct
QDHRGDVRTL

SEQ ID NO: 144401 - protein, 10 aa, synthetic construct
QDSRGDVRTL

SEQ ID NO: 144402 - protein, 10 aa, synthetic construct
QDTRGDVRTL

SEQ ID NO: 144403 - protein, 10 aa, synthetic construct
QDYRGDVRTL

SEQ ID NO: 144404 - protein, 10 aa, synthetic construct
QDNRGDVRTL

SEQ ID NO: 144405 - protein, 10 aa, synthetic construct
QDQRGDVRTL

SEQ ID NO: 144406 - protein, 10 aa, synthetic construct
QDDRGDVRTL

SEQ ID NO: 144407 - protein, 10 aa, synthetic construct
QDERGDVRTL

SEQ ID NO: 144408 - protein, 10 aa, synthetic construct
QEGRGDVRTL

SEQ ID NO: 144409 - protein, 10 aa, synthetic construct
QEARGDVRTL

SEQ ID NO: 144410 - protein, 10 aa, synthetic construct
QEVRGDVRTL

SEQ ID NO: 144411 - protein, 10 aa, synthetic construct
QEPRGDVRTL

SEQ ID NO: 144412 - protein, 10 aa, synthetic construct
QELRGDVRTL

SEQ ID NO: 144413 - protein, 10 aa, synthetic construct
QEIRGDVRTL

SEQ ID NO: 144414 - protein, 10 aa, synthetic construct
QEMRGDVRTL

SEQ ID NO: 144415 - protein, 10 aa, synthetic construct
QEWRGDVRTL

SEQ ID NO: 144416 - protein, 10 aa, synthetic construct
QEFRGDVRTL

SEQ ID NO: 144417 - protein, 10 aa, synthetic construct
QEKRGDVRTL

SEQ ID NO: 144418 - protein, 10 aa, synthetic construct
QERRGDVRTL

SEQ ID NO: 144419 - protein, 10 aa, synthetic construct
QEHRGDVRTL

SEQ ID NO: 144420 - protein, 10 aa, synthetic construct
QESRGDVRTL

SEQ ID NO: 144421 - protein, 10 aa, synthetic construct
QETRGDVRTL

SEQ ID NO: 144422 - protein, 10 aa, synthetic construct
QEYRGDVRTL

SEQ ID NO: 144423 - protein, 10 aa, synthetic construct
QENRGDVRTL

SEQ ID NO: 144424 - protein, 10 aa, synthetic construct
QEQRGDVRTL

SEQ ID NO: 144425 - protein, 10 aa, synthetic construct
QEDRGDVRTL

SEQ ID NO: 144426 - protein, 10 aa, synthetic construct
QEERGDVRTL

SEQ ID NO: 144427 - protein, 10 aa, synthetic construct
AAARGDFQNT

SEQ ID NO: 144428 - protein, 10 aa, synthetic construct
AADRGDFQNT

SEQ ID NO: 144429 - protein, 10 aa, synthetic construct
AAERGDFQNT

SEQ ID NO: 144430 - protein, 10 aa, synthetic construct
AANRGDFQNT

SEQ ID NO: 144431 - protein, 10 aa, synthetic construct
AAQRGDFQNT

SEQ ID NO: 144432 - protein, 10 aa, synthetic construct
AASRGDFQNT

SEQ ID NO: 144433 - protein, 10 aa, synthetic construct
AATRGDFQNT

SEQ ID NO: 144434 - protein, 10 aa, synthetic construct
AAFRGDFQNT

SEQ ID NO: 144435 - protein, 10 aa, synthetic construct
AAGRGDFQNT

SEQ ID NO: 144436 - protein, 10 aa, synthetic construct
AAHRGDFQNT

SEQ ID NO: 144437 - protein, 10 aa, synthetic construct
AAIRGDFQNT

SEQ ID NO: 144438 - protein, 10 aa, synthetic construct
AAKRGDFQNT

SEQ ID NO: 144439 - protein, 10 aa, synthetic construct
AALRGDFQNT

SEQ ID NO: 144440 - protein, 10 aa, synthetic construct
AAMRGDFQNT

SEQ ID NO: 144441 - protein, 10 aa, synthetic construct
AAPRGDFQNT

SEQ ID NO: 144442 - protein, 10 aa, synthetic construct
AARRGDFQNT

SEQ ID NO: 144443 - protein, 10 aa, synthetic construct
AAVRGDFQNT

SEQ ID NO: 144444 - protein, 10 aa, synthetic construct
AAWRGDFQNT

SEQ ID NO: 144445 - protein, 10 aa, synthetic construct
AAYRGDFQNT

SEQ ID NO: 144446 - protein, 10 aa, synthetic construct
ADARGDFQNT

SEQ ID NO: 144447 - protein, 10 aa, synthetic construct
ADDRGDFQNT

SEQ ID NO: 144448 - protein, 10 aa, synthetic construct
ADERGDFQNT

SEQ ID NO: 144449 - protein, 10 aa, synthetic construct
ADNRGDFQNT

SEQ ID NO: 144450 - protein, 10 aa, synthetic construct
ADQRGDFQNT

SEQ ID NO: 144451 - protein, 10 aa, synthetic construct
ADSRGDFQNT

SEQ ID NO: 144452 - protein, 10 aa, synthetic construct
ADTRGDFQNT

SEQ ID NO: 144453 - protein, 10 aa, synthetic construct
ADFRGDFQNT

SEQ ID NO: 144454 - protein, 10 aa, synthetic construct
ADGRGDFQNT

SEQ ID NO: 144455 - protein, 10 aa, synthetic construct
ADHRGDFQNT

SEQ ID NO: 144456 - protein, 10 aa, synthetic construct
ADIRGDFQNT

SEQ ID NO: 144457 - protein, 10 aa, synthetic construct
ADKRGDFQNT

SEQ ID NO: 144458 - protein, 10 aa, synthetic construct
ADLRGDFQNT

SEQ ID NO: 144459 - protein, 10 aa, synthetic construct
ADMRGDFQNT

SEQ ID NO: 144460 - protein, 10 aa, synthetic construct
ADPRGDFQNT

SEQ ID NO: 144461 - protein, 10 aa, synthetic construct
ADRRGDFQNT

SEQ ID NO: 144462 - protein, 10 aa, synthetic construct
ADVRGDFQNT

SEQ ID NO: 144463 - protein, 10 aa, synthetic construct
ADWRGDFQNT

SEQ ID NO: 144464 - protein, 10 aa, synthetic construct
ADYRGDFQNT

SEQ ID NO: 144465 - protein, 10 aa, synthetic construct
AEARGDFQNT

SEQ ID NO: 144466 - protein, 10 aa, synthetic construct
AEDRGDFQNT

SEQ ID NO: 144467 - protein, 10 aa, synthetic construct
AEERGDFQNT

SEQ ID NO: 144468 - protein, 10 aa, synthetic construct
AENRGDFQNT

SEQ ID NO: 144469 - protein, 10 aa, synthetic construct
AEQRGDFQNT

SEQ ID NO: 144470 - protein, 10 aa, synthetic construct
AESRGDFQNT

SEQ ID NO: 144471 - protein, 10 aa, synthetic construct
AETRGDFQNT

SEQ ID NO: 144472 - protein, 10 aa, synthetic construct
AEFRGDFQNT

SEQ ID NO: 144473 - protein, 10 aa, synthetic construct
AEGRGDFQNT

SEQ ID NO: 144474 - protein, 10 aa, synthetic construct
AEHRGDFQNT

SEQ ID NO: 144475 - protein, 10 aa, synthetic construct
AEIRGDFQNT

SEQ ID NO: 144476 - protein, 10 aa, synthetic construct
AEKRGDFQNT

SEQ ID NO: 144477 - protein, 10 aa, synthetic construct
AELRGDFQNT

SEQ ID NO: 144478 - protein, 10 aa, synthetic construct
AEMRGDFQNT

SEQ ID NO: 144479 - protein, 10 aa, synthetic construct
AEPRGDFQNT

SEQ ID NO: 144480 - protein, 10 aa, synthetic construct
AERRGDFQNT

SEQ ID NO: 144481 - protein, 10 aa, synthetic construct
AEVRGDFQNT

SEQ ID NO: 144482 - protein, 10 aa, synthetic construct
AEWRGDFQNT

SEQ ID NO: 144483 - protein, 10 aa, synthetic construct
AEYRGDFQNT

SEQ ID NO: 144484 - protein, 10 aa, synthetic construct
ANARGDFQNT

SEQ ID NO: 144485 - protein, 10 aa, synthetic construct
ANDRGDFQNT

SEQ ID NO: 144486 - protein, 10 aa, synthetic construct
ANERGDFQNT

SEQ ID NO: 144487 - protein, 10 aa, synthetic construct
ANNRGDFQNT

SEQ ID NO: 144488 - protein, 10 aa, synthetic construct
ANQRGDFQNT

SEQ ID NO: 144489 - protein, 10 aa, synthetic construct
ANSRGDFQNT

SEQ ID NO: 144490 - protein, 10 aa, synthetic construct
ANTRGDFQNT

SEQ ID NO: 144491 - protein, 10 aa, synthetic construct
ANFRGDFQNT

SEQ ID NO: 144492 - protein, 10 aa, synthetic construct
ANGRGDFQNT

SEQ ID NO: 144493 - protein, 10 aa, synthetic construct
ANHRGDFQNT

SEQ ID NO: 144494 - protein, 10 aa, synthetic construct
ANIRGDFQNT

SEQ ID NO: 144495 - protein, 10 aa, synthetic construct
ANKRGDFQNT

SEQ ID NO: 144496 - protein, 10 aa, synthetic construct
ANLRGDFQNT

SEQ ID NO: 144497 - protein, 10 aa, synthetic construct
ANMRGDFQNT

SEQ ID NO: 144498 - protein, 10 aa, synthetic construct
ANPRGDFQNT

SEQ ID NO: 144499 - protein, 10 aa, synthetic construct
ANRRGDFQNT

SEQ ID NO: 144500 - protein, 10 aa, synthetic construct
ANVRGDFQNT

SEQ ID NO: 144501 - protein, 10 aa, synthetic construct
ANWRGDFQNT

SEQ ID NO: 144502 - protein, 10 aa, synthetic construct
ANYRGDFQNT

SEQ ID NO: 144503 - protein, 10 aa, synthetic construct
AQARGDFQNT

SEQ ID NO: 144504 - protein, 10 aa, synthetic construct
AQDRGDFQNT

SEQ ID NO: 144505 - protein, 10 aa, synthetic construct
AQERGDFQNT

SEQ ID NO: 144506 - protein, 10 aa, synthetic construct
AQNRGDFQNT

SEQ ID NO: 144507 - protein, 10 aa, synthetic construct
AQQRGDFQNT

SEQ ID NO: 144508 - protein, 10 aa, synthetic construct
AQSRGDFQNT

SEQ ID NO: 144509 - protein, 10 aa, synthetic construct
AQTRGDFQNT

SEQ ID NO: 144510 - protein, 10 aa, synthetic construct
AQFRGDFQNT

SEQ ID NO: 144511 - protein, 10 aa, synthetic construct
AQGRGDFQNT

SEQ ID NO: 144512 - protein, 10 aa, synthetic construct
AQHRGDFQNT

SEQ ID NO: 144513 - protein, 10 aa, synthetic construct
AQIRGDFQNT

SEQ ID NO: 144514 - protein, 10 aa, synthetic construct
AQKRGDFQNT

SEQ ID NO: 144515 - protein, 10 aa, synthetic construct
AQLRGDFQNT

SEQ ID NO: 144516 - protein, 10 aa, synthetic construct
AQMRGDFQNT

SEQ ID NO: 144517 - protein, 10 aa, synthetic construct
AQPRGDFQNT

SEQ ID NO: 144518 - protein, 10 aa, synthetic construct
AQRRGDFQNT

SEQ ID NO: 144519 - protein, 10 aa, synthetic construct
AQVRGDFQNT

SEQ ID NO: 144520 - protein, 10 aa, synthetic construct
AQWRGDFQNT

SEQ ID NO: 144521 - protein, 10 aa, synthetic construct
AQYRGDFQNT

SEQ ID NO: 144522 - protein, 10 aa, synthetic construct
ASARGDFQNT

SEQ ID NO: 144523 - protein, 10 aa, synthetic construct
ASDRGDFQNT

SEQ ID NO: 144524 - protein, 10 aa, synthetic construct
ASERGDFQNT

SEQ ID NO: 144525 - protein, 10 aa, synthetic construct
ASNRGDFQNT

SEQ ID NO: 144526 - protein, 10 aa, synthetic construct
ASQRGDFQNT

SEQ ID NO: 144527 - protein, 10 aa, synthetic construct
ASSRGDFQNT

SEQ ID NO: 144528 - protein, 10 aa, synthetic construct
ASTRGDFQNT

SEQ ID NO: 144529 - protein, 10 aa, synthetic construct
ASFRGDFQNT

SEQ ID NO: 144530 - protein, 10 aa, synthetic construct
ASGRGDFQNT

SEQ ID NO: 144531 - protein, 10 aa, synthetic construct
ASHRGDFQNT

SEQ ID NO: 144532 - protein, 10 aa, synthetic construct
ASIRGDFQNT

SEQ ID NO: 144533 - protein, 10 aa, synthetic construct
ASKRGDFQNT

SEQ ID NO: 144534 - protein, 10 aa, synthetic construct
ASLRGDFQNT

SEQ ID NO: 144535 - protein, 10 aa, synthetic construct
ASMRGDFQNT

SEQ ID NO: 144536 - protein, 10 aa, synthetic construct
ASPRGDFQNT

SEQ ID NO: 144537 - protein, 10 aa, synthetic construct
ASRRGDFQNT

SEQ ID NO: 144538 - protein, 10 aa, synthetic construct
ASVRGDFQNT

SEQ ID NO: 144539 - protein, 10 aa, synthetic construct
ASWRGDFQNT

SEQ ID NO: 144540 - protein, 10 aa, synthetic construct
ASYRGDFQNT

SEQ ID NO: 144541 - protein, 10 aa, synthetic construct
ATARGDFQNT

SEQ ID NO: 144542 - protein, 10 aa, synthetic construct
ATDRGDFQNT

SEQ ID NO: 144543 - protein, 10 aa, synthetic construct
ATERGDFQNT

SEQ ID NO: 144544 - protein, 10 aa, synthetic construct
ATNRGDFQNT

SEQ ID NO: 144545 - protein, 10 aa, synthetic construct
ATQRGDFQNT

SEQ ID NO: 144546 - protein, 10 aa, synthetic construct
ATSRGDFQNT

SEQ ID NO: 144547 - protein, 10 aa, synthetic construct
ATTRGDFQNT

SEQ ID NO: 144548 - protein, 10 aa, synthetic construct
ATFRGDFQNT

SEQ ID NO: 144549 - protein, 10 aa, synthetic construct
ATGRGDFQNT

SEQ ID NO: 144550 - protein, 10 aa, synthetic construct
ATHRGDFQNT

SEQ ID NO: 144551 - protein, 10 aa, synthetic construct
ATIRGDFQNT

SEQ ID NO: 144552 - protein, 10 aa, synthetic construct
ATKRGDFQNT

SEQ ID NO: 144553 - protein, 10 aa, synthetic construct
ATLRGDFQNT

SEQ ID NO: 144554 - protein, 10 aa, synthetic construct
ATMRGDFQNT

SEQ ID NO: 144555 - protein, 10 aa, synthetic construct
ATPRGDFQNT

SEQ ID NO: 144556 - protein, 10 aa, synthetic construct
ATRRGDFQNT

SEQ ID NO: 144557 - protein, 10 aa, synthetic construct
ATVRGDFQNT

SEQ ID NO: 144558 - protein, 10 aa, synthetic construct
ATWRGDFQNT

SEQ ID NO: 144559 - protein, 10 aa, synthetic construct
ATYRGDFQNT

SEQ ID NO: 144560 - protein, 10 aa, synthetic construct
AFARGDFQNT

SEQ ID NO: 144561 - protein, 10 aa, synthetic construct
AFDRGDFQNT

SEQ ID NO: 144562 - protein, 10 aa, synthetic construct
AFERGDFQNT

SEQ ID NO: 144563 - protein, 10 aa, synthetic construct
AFNRGDFQNT

SEQ ID NO: 144564 - protein, 10 aa, synthetic construct
AFQRGDFQNT

SEQ ID NO: 144565 - protein, 10 aa, synthetic construct
AFSRGDFQNT

SEQ ID NO: 144566 - protein, 10 aa, synthetic construct
AFTRGDFQNT

SEQ ID NO: 144567 - protein, 10 aa, synthetic construct
AFFRGDFQNT

SEQ ID NO: 144568 - protein, 10 aa, synthetic construct
AFGRGDFQNT

SEQ ID NO: 144569 - protein, 10 aa, synthetic construct
AFHRGDFQNT

SEQ ID NO: 144570 - protein, 10 aa, synthetic construct
AFIRGDFQNT

SEQ ID NO: 144571 - protein, 10 aa, synthetic construct
AFKRGDFQNT

SEQ ID NO: 144572 - protein, 10 aa, synthetic construct
AFLRGDFQNT

SEQ ID NO: 144573 - protein, 10 aa, synthetic construct
AFMRGDFQNT

SEQ ID NO: 144574 - protein, 10 aa, synthetic construct
AFPRGDFQNT

SEQ ID NO: 144575 - protein, 10 aa, synthetic construct
AFRRGDFQNT

SEQ ID NO: 144576 - protein, 10 aa, synthetic construct
AFVRGDFQNT

SEQ ID NO: 144577 - protein, 10 aa, synthetic construct
AFWRGDFQNT

SEQ ID NO: 144578 - protein, 10 aa, synthetic construct
AFYRGDFQNT

SEQ ID NO: 144579 - protein, 10 aa, synthetic construct
AGARGDFQNT

SEQ ID NO: 144580 - protein, 10 aa, synthetic construct
AGDRGDFQNT

SEQ ID NO: 144581 - protein, 10 aa, synthetic construct
AGERGDFQNT

SEQ ID NO: 144582 - protein, 10 aa, synthetic construct
AGNRGDFQNT

SEQ ID NO: 144583 - protein, 10 aa, synthetic construct
AGQRGDFQNT

SEQ ID NO: 144584 - protein, 10 aa, synthetic construct
AGSRGDFQNT

SEQ ID NO: 144585 - protein, 10 aa, synthetic construct
AGTRGDFQNT

SEQ ID NO: 144586 - protein, 10 aa, synthetic construct
AGFRGDFQNT

SEQ ID NO: 144587 - protein, 10 aa, synthetic construct
AGGRGDFQNT

SEQ ID NO: 144588 - protein, 10 aa, synthetic construct
AGHRGDFQNT

SEQ ID NO: 144589 - protein, 10 aa, synthetic construct
AGIRGDFQNT

SEQ ID NO: 144590 - protein, 10 aa, synthetic construct
AGKRGDFQNT

SEQ ID NO: 144591 - protein, 10 aa, synthetic construct
AGLRGDFQNT

SEQ ID NO: 144592 - protein, 10 aa, synthetic construct
AGMRGDFQNT

SEQ ID NO: 144593 - protein, 10 aa, synthetic construct
AGPRGDFQNT

SEQ ID NO: 144594 - protein, 10 aa, synthetic construct
AGRRGDFQNT

SEQ ID NO: 144595 - protein, 10 aa, synthetic construct
AGVRGDFQNT

SEQ ID NO: 144596 - protein, 10 aa, synthetic construct
AGWRGDFQNT

SEQ ID NO: 144597 - protein, 10 aa, synthetic construct
AGYRGDFQNT

SEQ ID NO: 144598 - protein, 10 aa, synthetic construct
AHARGDFQNT

SEQ ID NO: 144599 - protein, 10 aa, synthetic construct
AHDRGDFQNT

SEQ ID NO: 144600 - protein, 10 aa, synthetic construct
AHERGDFQNT

SEQ ID NO: 144601 - protein, 10 aa, synthetic construct
AHNRGDFQNT

SEQ ID NO: 144602 - protein, 10 aa, synthetic construct
AHQRGDFQNT

SEQ ID NO: 144603 - protein, 10 aa, synthetic construct
AHSRGDFQNT

SEQ ID NO: 144604 - protein, 10 aa, synthetic construct
AHTRGDFQNT

SEQ ID NO: 144605 - protein, 10 aa, synthetic construct
AHFRGDFQNT

SEQ ID NO: 144606 - protein, 10 aa, synthetic construct
AHGRGDFQNT

SEQ ID NO: 144607 - protein, 10 aa, synthetic construct
AHHRGDFQNT

SEQ ID NO: 144608 - protein, 10 aa, synthetic construct
AHIRGDFQNT

SEQ ID NO: 144609 - protein, 10 aa, synthetic construct
AHKRGDFQNT

SEQ ID NO: 144610 - protein, 10 aa, synthetic construct
AHLRGDFQNT

SEQ ID NO: 144611 - protein, 10 aa, synthetic construct
AHMRGDFQNT

SEQ ID NO: 144612 - protein, 10 aa, synthetic construct
AHPRGDFQNT

SEQ ID NO: 144613 - protein, 10 aa, synthetic construct
AHRRGDFQNT

SEQ ID NO: 144614 - protein, 10 aa, synthetic construct
AHVRGDFQNT

SEQ ID NO: 144615 - protein, 10 aa, synthetic construct
AHWRGDFQNT

SEQ ID NO: 144616 - protein, 10 aa, synthetic construct
AHYRGDFQNT

SEQ ID NO: 144617 - protein, 10 aa, synthetic construct
AIARGDFQNT

SEQ ID NO: 144618 - protein, 10 aa, synthetic construct
AIDRGDFQNT

SEQ ID NO: 144619 - protein, 10 aa, synthetic construct
AIERGDFQNT

SEQ ID NO: 144620 - protein, 10 aa, synthetic construct
AINRGDFQNT

SEQ ID NO: 144621 - protein, 10 aa, synthetic construct
AIQRGDFQNT

SEQ ID NO: 144622 - protein, 10 aa, synthetic construct
AISRGDFQNT

SEQ ID NO: 144623 - protein, 10 aa, synthetic construct
AITRGDFQNT

SEQ ID NO: 144624 - protein, 10 aa, synthetic construct
AIFRGDFQNT

SEQ ID NO: 144625 - protein, 10 aa, synthetic construct
AIGRGDFQNT

SEQ ID NO: 144626 - protein, 10 aa, synthetic construct
AIHRGDFQNT

SEQ ID NO: 144627 - protein, 10 aa, synthetic construct
AIIRGDFQNT

SEQ ID NO: 144628 - protein, 10 aa, synthetic construct
AIKRGDFQNT

SEQ ID NO: 144629 - protein, 10 aa, synthetic construct
AILRGDFQNT

SEQ ID NO: 144630 - protein, 10 aa, synthetic construct
AIMRGDFQNT

SEQ ID NO: 144631 - protein, 10 aa, synthetic construct
AIPRGDFQNT

SEQ ID NO: 144632 - protein, 10 aa, synthetic construct
AIRRGDFQNT

SEQ ID NO: 144633 - protein, 10 aa, synthetic construct
AIVRGDFQNT

SEQ ID NO: 144634 - protein, 10 aa, synthetic construct
AIWRGDFQNT

SEQ ID NO: 144635 - protein, 10 aa, synthetic construct
AIYRGDFQNT

SEQ ID NO: 144636 - protein, 10 aa, synthetic construct
AKARGDFQNT

SEQ ID NO: 144637 - protein, 10 aa, synthetic construct
AKDRGDFQNT

SEQ ID NO: 144638 - protein, 10 aa, synthetic construct
AKERGDFQNT

SEQ ID NO: 144639 - protein, 10 aa, synthetic construct
AKNRGDFQNT

SEQ ID NO: 144640 - protein, 10 aa, synthetic construct
AKQRGDFQNT

SEQ ID NO: 144641 - protein, 10 aa, synthetic construct
AKSRGDFQNT

SEQ ID NO: 144642 - protein, 10 aa, synthetic construct
AKTRGDFQNT

SEQ ID NO: 144643 - protein, 10 aa, synthetic construct
AKFRGDFQNT

SEQ ID NO: 144644 - protein, 10 aa, synthetic construct
AKGRGDFQNT

SEQ ID NO: 144645 - protein, 10 aa, synthetic construct
AKHRGDFQNT

SEQ ID NO: 144646 - protein, 10 aa, synthetic construct
AKIRGDFQNT

SEQ ID NO: 144647 - protein, 10 aa, synthetic construct
AKKRGDFQNT

SEQ ID NO: 144648 - protein, 10 aa, synthetic construct
AKLRGDFQNT

SEQ ID NO: 144649 - protein, 10 aa, synthetic construct
AKMRGDFQNT

SEQ ID NO: 144650 - protein, 10 aa, synthetic construct
AKPRGDFQNT

SEQ ID NO: 144651 - protein, 10 aa, synthetic construct
AKRRGDFQNT

SEQ ID NO: 144652 - protein, 10 aa, synthetic construct
AKVRGDFQNT

SEQ ID NO: 144653 - protein, 10 aa, synthetic construct
AKWRGDFQNT

SEQ ID NO: 144654 - protein, 10 aa, synthetic construct
AKYRGDFQNT

SEQ ID NO: 144655 - protein, 10 aa, synthetic construct
ALARGDFQNT

SEQ ID NO: 144656 - protein, 10 aa, synthetic construct
ALDRGDFQNT

SEQ ID NO: 144657 - protein, 10 aa, synthetic construct
ALERGDFQNT

SEQ ID NO: 144658 - protein, 10 aa, synthetic construct
ALNRGDFQNT

SEQ ID NO: 144659 - protein, 10 aa, synthetic construct
ALQRGDFQNT

SEQ ID NO: 144660 - protein, 10 aa, synthetic construct
ALSRGDFQNT

SEQ ID NO: 144661 - protein, 10 aa, synthetic construct
ALTRGDFQNT

SEQ ID NO: 144662 - protein, 10 aa, synthetic construct
ALFRGDFQNT

SEQ ID NO: 144663 - protein, 10 aa, synthetic construct
ALGRGDFQNT

SEQ ID NO: 144664 - protein, 10 aa, synthetic construct
ALHRGDFQNT

SEQ ID NO: 144665 - protein, 10 aa, synthetic construct
ALIRGDFQNT

SEQ ID NO: 144666 - protein, 10 aa, synthetic construct
ALKRGDFQNT

SEQ ID NO: 144667 - protein, 10 aa, synthetic construct
ALLRGDFQNT

SEQ ID NO: 144668 - protein, 10 aa, synthetic construct
ALMRGDFQNT

SEQ ID NO: 144669 - protein, 10 aa, synthetic construct
ALPRGDFQNT

SEQ ID NO: 144670 - protein, 10 aa, synthetic construct
ALRRGDFQNT

SEQ ID NO: 144671 - protein, 10 aa, synthetic construct
ALVRGDFQNT

SEQ ID NO: 144672 - protein, 10 aa, synthetic construct
ALWRGDFQNT

SEQ ID NO: 144673 - protein, 10 aa, synthetic construct
ALYRGDFQNT

SEQ ID NO: 144674 - protein, 10 aa, synthetic construct
AMARGDFQNT

SEQ ID NO: 144675 - protein, 10 aa, synthetic construct
AMDRGDFQNT

SEQ ID NO: 144676 - protein, 10 aa, synthetic construct
AMERGDFQNT

SEQ ID NO: 144677 - protein, 10 aa, synthetic construct
AMNRGDFQNT

SEQ ID NO: 144678 - protein, 10 aa, synthetic construct
AMQRGDFQNT

SEQ ID NO: 144679 - protein, 10 aa, synthetic construct
AMSRGDFQNT

SEQ ID NO: 144680 - protein, 10 aa, synthetic construct
AMTRGDFQNT

SEQ ID NO: 144681 - protein, 10 aa, synthetic construct
AMFRGDFQNT

SEQ ID NO: 144682 - protein, 10 aa, synthetic construct
AMGRGDFQNT

SEQ ID NO: 144683 - protein, 10 aa, synthetic construct
AMHRGDFQNT

SEQ ID NO: 144684 - protein, 10 aa, synthetic construct
AMIRGDFQNT

SEQ ID NO: 144685 - protein, 10 aa, synthetic construct
AMKRGDFQNT

SEQ ID NO: 144686 - protein, 10 aa, synthetic construct
AMLRGDFQNT

SEQ ID NO: 144687 - protein, 10 aa, synthetic construct
AMMRGDFQNT

SEQ ID NO: 144688 - protein, 10 aa, synthetic construct
AMPRGDFQNT

SEQ ID NO: 144689 - protein, 10 aa, synthetic construct
AMRRGDFQNT

SEQ ID NO: 144690 - protein, 10 aa, synthetic construct
AMVRGDFQNT

SEQ ID NO: 144691 - protein, 10 aa, synthetic construct
AMWRGDFQNT

SEQ ID NO: 144692 - protein, 10 aa, synthetic construct
AMYRGDFQNT

SEQ ID NO: 144693 - protein, 10 aa, synthetic construct
APARGDFQNT

SEQ ID NO: 144694 - protein, 10 aa, synthetic construct
APDRGDFQNT

SEQ ID NO: 144695 - protein, 10 aa, synthetic construct
APERGDFQNT

SEQ ID NO: 144696 - protein, 10 aa, synthetic construct
APNRGDFQNT

SEQ ID NO: 144697 - protein, 10 aa, synthetic construct
APQRGDFQNT

SEQ ID NO: 144698 - protein, 10 aa, synthetic construct
APSRGDFQNT

SEQ ID NO: 144699 - protein, 10 aa, synthetic construct
APTRGDFQNT

SEQ ID NO: 144700 - protein, 10 aa, synthetic construct
APFRGDFQNT

SEQ ID NO: 144701 - protein, 10 aa, synthetic construct
APGRGDFQNT

SEQ ID NO: 144702 - protein, 10 aa, synthetic construct
APHRGDFQNT

SEQ ID NO: 144703 - protein, 10 aa, synthetic construct
APIRGDFQNT

SEQ ID NO: 144704 - protein, 10 aa, synthetic construct
APKRGDFQNT

SEQ ID NO: 144705 - protein, 10 aa, synthetic construct
APLRGDFQNT

SEQ ID NO: 144706 - protein, 10 aa, synthetic construct
APMRGDFQNT

SEQ ID NO: 144707 - protein, 10 aa, synthetic construct
APPRGDFQNT

SEQ ID NO: 144708 - protein, 10 aa, synthetic construct
APRRGDFQNT

SEQ ID NO: 144709 - protein, 10 aa, synthetic construct
APVRGDFQNT

SEQ ID NO: 144710 - protein, 10 aa, synthetic construct
APWRGDFQNT

SEQ ID NO: 144711 - protein, 10 aa, synthetic construct
APYRGDFQNT

SEQ ID NO: 144712 - protein, 10 aa, synthetic construct
ARARGDFQNT

SEQ ID NO: 144713 - protein, 10 aa, synthetic construct
ARDRGDFQNT

SEQ ID NO: 144714 - protein, 10 aa, synthetic construct
ARERGDFQNT

SEQ ID NO: 144715 - protein, 10 aa, synthetic construct
ARNRGDFQNT

SEQ ID NO: 144716 - protein, 10 aa, synthetic construct
ARQRGDFQNT

SEQ ID NO: 144717 - protein, 10 aa, synthetic construct
ARSRGDFQNT

SEQ ID NO: 144718 - protein, 10 aa, synthetic construct
ARTRGDFQNT

SEQ ID NO: 144719 - protein, 10 aa, synthetic construct
ARFRGDFQNT

SEQ ID NO: 144720 - protein, 10 aa, synthetic construct
ARGRGDFQNT

SEQ ID NO: 144721 - protein, 10 aa, synthetic construct
ARHRGDFQNT

SEQ ID NO: 144722 - protein, 10 aa, synthetic construct
ARIRGDFQNT

SEQ ID NO: 144723 - protein, 10 aa, synthetic construct
ARKRGDFQNT

SEQ ID NO: 144724 - protein, 10 aa, synthetic construct
ARLRGDFQNT

SEQ ID NO: 144725 - protein, 10 aa, synthetic construct
ARMRGDFQNT

SEQ ID NO: 144726 - protein, 10 aa, synthetic construct
ARPRGDFQNT

SEQ ID NO: 144727 - protein, 10 aa, synthetic construct
ARRRGDFQNT

SEQ ID NO: 144728 - protein, 10 aa, synthetic construct
ARVRGDFQNT

SEQ ID NO: 144729 - protein, 10 aa, synthetic construct
ARWRGDFQNT

SEQ ID NO: 144730 - protein, 10 aa, synthetic construct
ARYRGDFQNT

SEQ ID NO: 144731 - protein, 10 aa, synthetic construct
AVARGDFQNT

SEQ ID NO: 144732 - protein, 10 aa, synthetic construct
AVDRGDFQNT

SEQ ID NO: 144733 - protein, 10 aa, synthetic construct
AVERGDFQNT

SEQ ID NO: 144734 - protein, 10 aa, synthetic construct
AVNRGDFQNT

SEQ ID NO: 144735 - protein, 10 aa, synthetic construct
AVQRGDFQNT

SEQ ID NO: 144736 - protein, 10 aa, synthetic construct
AVSRGDFQNT

SEQ ID NO: 144737 - protein, 10 aa, synthetic construct
AVTRGDFQNT

SEQ ID NO: 144738 - protein, 10 aa, synthetic construct
AVFRGDFQNT

SEQ ID NO: 144739 - protein, 10 aa, synthetic construct
AVGRGDFQNT

SEQ ID NO: 144740 - protein, 10 aa, synthetic construct
AVHRGDFQNT

SEQ ID NO: 144741 - protein, 10 aa, synthetic construct
AVIRGDFQNT

SEQ ID NO: 144742 - protein, 10 aa, synthetic construct
AVKRGDFQNT

SEQ ID NO: 144743 - protein, 10 aa, synthetic construct
AVLRGDFQNT

SEQ ID NO: 144744 - protein, 10 aa, synthetic construct
AVMRGDFQNT

SEQ ID NO: 144745 - protein, 10 aa, synthetic construct
AVPRGDFQNT

SEQ ID NO: 144746 - protein, 10 aa, synthetic construct
AVRRGDFQNT

SEQ ID NO: 144747 - protein, 10 aa, synthetic construct
AVVRGDFQNT

SEQ ID NO: 144748 - protein, 10 aa, synthetic construct
AVWRGDFQNT

SEQ ID NO: 144749 - protein, 10 aa, synthetic construct
AVYRGDFQNT

SEQ ID NO: 144750 - protein, 10 aa, synthetic construct
AWARGDFQNT

SEQ ID NO: 144751 - protein, 10 aa, synthetic construct
AWDRGDFQNT

SEQ ID NO: 144752 - protein, 10 aa, synthetic construct
AWERGDFQNT

SEQ ID NO: 144753 - protein, 10 aa, synthetic construct
AWNRGDFQNT

SEQ ID NO: 144754 - protein, 10 aa, synthetic construct
AWQRGDFQNT

SEQ ID NO: 144755 - protein, 10 aa, synthetic construct
AWSRGDFQNT

SEQ ID NO: 144756 - protein, 10 aa, synthetic construct
AWTRGDFQNT

SEQ ID NO: 144757 - protein, 10 aa, synthetic construct
AWFRGDFQNT

SEQ ID NO: 144758 - protein, 10 aa, synthetic construct
AWGRGDFQNT

SEQ ID NO: 144759 - protein, 10 aa, synthetic construct
AWHRGDFQNT

SEQ ID NO: 144760 - protein, 10 aa, synthetic construct
AWIRGDFQNT

SEQ ID NO: 144761 - protein, 10 aa, synthetic construct
AWKRGDFQNT

SEQ ID NO: 144762 - protein, 10 aa, synthetic construct
AWLRGDFQNT

SEQ ID NO: 144763 - protein, 10 aa, synthetic construct
AWMRGDFQNT

SEQ ID NO: 144764 - protein, 10 aa, synthetic construct
AWPRGDFQNT

SEQ ID NO: 144765 - protein, 10 aa, synthetic construct
AWRRGDFQNT

SEQ ID NO: 144766 - protein, 10 aa, synthetic construct
AWVRGDFQNT

SEQ ID NO: 144767 - protein, 10 aa, synthetic construct
AWWRGDFQNT

SEQ ID NO: 144768 - protein, 10 aa, synthetic construct
AWYRGDFQNT

SEQ ID NO: 144769 - protein, 10 aa, synthetic construct
AYARGDFQNT

SEQ ID NO: 144770 - protein, 10 aa, synthetic construct
AYDRGDFQNT

SEQ ID NO: 144771 - protein, 10 aa, synthetic construct
AYERGDFQNT

SEQ ID NO: 144772 - protein, 10 aa, synthetic construct
AYNRGDFQNT

SEQ ID NO: 144773 - protein, 10 aa, synthetic construct
AYQRGDFQNT

SEQ ID NO: 144774 - protein, 10 aa, synthetic construct
AYSRGDFQNT

SEQ ID NO: 144775 - protein, 10 aa, synthetic construct
AYTRGDFQNT

SEQ ID NO: 144776 - protein, 10 aa, synthetic construct
AYFRGDFQNT

SEQ ID NO: 144777 - protein, 10 aa, synthetic construct
AYGRGDFQNT

SEQ ID NO: 144778 - protein, 10 aa, synthetic construct
AYHRGDFQNT

SEQ ID NO: 144779 - protein, 10 aa, synthetic construct
AYIRGDFQNT

SEQ ID NO: 144780 - protein, 10 aa, synthetic construct
AYKRGDFQNT

SEQ ID NO: 144781 - protein, 10 aa, synthetic construct
AYLRGDFQNT

SEQ ID NO: 144782 - protein, 10 aa, synthetic construct
AYMRGDFQNT

SEQ ID NO: 144783 - protein, 10 aa, synthetic construct
AYPRGDFQNT

SEQ ID NO: 144784 - protein, 10 aa, synthetic construct
AYRRGDFQNT

SEQ ID NO: 144785 - protein, 10 aa, synthetic construct
AYVRGDFQNT

SEQ ID NO: 144786 - protein, 10 aa, synthetic construct
AYWRGDFQNT

SEQ ID NO: 144787 - protein, 10 aa, synthetic construct
AYYRGDFQNT

SEQ ID NO: 144788 - protein, 10 aa, synthetic construct
DAARGDFQNT

SEQ ID NO: 144789 - protein, 10 aa, synthetic construct
DADRGDFQNT

SEQ ID NO: 144790 - protein, 10 aa, synthetic construct
DAERGDFQNT

SEQ ID NO: 144791 - protein, 10 aa, synthetic construct
DANRGDFQNT

SEQ ID NO: 144792 - protein, 10 aa, synthetic construct
DAQRGDFQNT

SEQ ID NO: 144793 - protein, 10 aa, synthetic construct
DASRGDFQNT

SEQ ID NO: 144794 - protein, 10 aa, synthetic construct
DATRGDFQNT

SEQ ID NO: 144795 - protein, 10 aa, synthetic construct
DAFRGDFQNT

SEQ ID NO: 144796 - protein, 10 aa, synthetic construct
DAGRGDFQNT

SEQ ID NO: 144797 - protein, 10 aa, synthetic construct
DAHRGDFQNT

SEQ ID NO: 144798 - protein, 10 aa, synthetic construct
DAIRGDFQNT

SEQ ID NO: 144799 - protein, 10 aa, synthetic construct
DAKRGDFQNT

SEQ ID NO: 144800 - protein, 10 aa, synthetic construct
DALRGDFQNT

SEQ ID NO: 144801 - protein, 10 aa, synthetic construct
DAMRGDFQNT

SEQ ID NO: 144802 - protein, 10 aa, synthetic construct
DAPRGDFQNT

SEQ ID NO: 144803 - protein, 10 aa, synthetic construct
DARRGDFQNT

SEQ ID NO: 144804 - protein, 10 aa, synthetic construct
DAVRGDFQNT

SEQ ID NO: 144805 - protein, 10 aa, synthetic construct
DAWRGDFQNT

SEQ ID NO: 144806 - protein, 10 aa, synthetic construct
DAYRGDFQNT

SEQ ID NO: 144807 - protein, 10 aa, synthetic construct
DDARGDFQNT

SEQ ID NO: 144808 - protein, 10 aa, synthetic construct
DDDRGDFQNT

SEQ ID NO: 144809 - protein, 10 aa, synthetic construct
DDERGDFQNT

SEQ ID NO: 144810 - protein, 10 aa, synthetic construct
DDNRGDFQNT

SEQ ID NO: 144811 - protein, 10 aa, synthetic construct
DDQRGDFQNT

SEQ ID NO: 144812 - protein, 10 aa, synthetic construct
DDSRGDFQNT

SEQ ID NO: 144813 - protein, 10 aa, synthetic construct
DDTRGDFQNT

SEQ ID NO: 144814 - protein, 10 aa, synthetic construct
DDFRGDFQNT

SEQ ID NO: 144815 - protein, 10 aa, synthetic construct
DDGRGDFQNT

SEQ ID NO: 144816 - protein, 10 aa, synthetic construct
DDHRGDFQNT

SEQ ID NO: 144817 - protein, 10 aa, synthetic construct
DDIRGDFQNT

SEQ ID NO: 144818 - protein, 10 aa, synthetic construct
DDKRGDFQNT

SEQ ID NO: 144819 - protein, 10 aa, synthetic construct
DDLRGDFQNT

SEQ ID NO: 144820 - protein, 10 aa, synthetic construct
DDMRGDFQNT

SEQ ID NO: 144821 - protein, 10 aa, synthetic construct
DDPRGDFQNT

SEQ ID NO: 144822 - protein, 10 aa, synthetic construct
DDRRGDFQNT

SEQ ID NO: 144823 - protein, 10 aa, synthetic construct
DDVRGDFQNT

SEQ ID NO: 144824 - protein, 10 aa, synthetic construct
DDWRGDFQNT

SEQ ID NO: 144825 - protein, 10 aa, synthetic construct
DDYRGDFQNT

SEQ ID NO: 144826 - protein, 10 aa, synthetic construct
DEARGDFQNT

SEQ ID NO: 144827 - protein, 10 aa, synthetic construct
DEDRGDFQNT

SEQ ID NO: 144828 - protein, 10 aa, synthetic construct
DEERGDFQNT

SEQ ID NO: 144829 - protein, 10 aa, synthetic construct
DENRGDFQNT

SEQ ID NO: 144830 - protein, 10 aa, synthetic construct
DEQRGDFQNT

SEQ ID NO: 144831 - protein, 10 aa, synthetic construct
DESRGDFQNT

SEQ ID NO: 144832 - protein, 10 aa, synthetic construct
DETRGDFQNT

SEQ ID NO: 144833 - protein, 10 aa, synthetic construct
DEFRGDFQNT

SEQ ID NO: 144834 - protein, 10 aa, synthetic construct
DEGRGDFQNT

SEQ ID NO: 144835 - protein, 10 aa, synthetic construct
DEHRGDFQNT

SEQ ID NO: 144836 - protein, 10 aa, synthetic construct
DEIRGDFQNT

SEQ ID NO: 144837 - protein, 10 aa, synthetic construct
DEKRGDFQNT

SEQ ID NO: 144838 - protein, 10 aa, synthetic construct
DELRGDFQNT

SEQ ID NO: 144839 - protein, 10 aa, synthetic construct
DEMRGDFQNT

SEQ ID NO: 144840 - protein, 10 aa, synthetic construct
DEPRGDFQNT

SEQ ID NO: 144841 - protein, 10 aa, synthetic construct
DERRGDFQNT

SEQ ID NO: 144842 - protein, 10 aa, synthetic construct
DEVRGDFQNT

SEQ ID NO: 144843 - protein, 10 aa, synthetic construct
DEWRGDFQNT

SEQ ID NO: 144844 - protein, 10 aa, synthetic construct
DEYRGDFQNT

SEQ ID NO: 144845 - protein, 10 aa, synthetic construct
DNARGDFQNT

SEQ ID NO: 144846 - protein, 10 aa, synthetic construct
DNDRGDFQNT

SEQ ID NO: 144847 - protein, 10 aa, synthetic construct
DNERGDFQNT

SEQ ID NO: 144848 - protein, 10 aa, synthetic construct
DNNRGDFQNT

SEQ ID NO: 144849 - protein, 10 aa, synthetic construct
DNQRGDFQNT

SEQ ID NO: 144850 - protein, 10 aa, synthetic construct
DNSRGDFQNT

SEQ ID NO: 144851 - protein, 10 aa, synthetic construct
DNTRGDFQNT

SEQ ID NO: 144852 - protein, 10 aa, synthetic construct
DNFRGDFQNT

SEQ ID NO: 144853 - protein, 10 aa, synthetic construct
DNGRGDFQNT

SEQ ID NO: 144854 - protein, 10 aa, synthetic construct
DNHRGDFQNT

SEQ ID NO: 144855 - protein, 10 aa, synthetic construct
DNIRGDFQNT

SEQ ID NO: 144856 - protein, 10 aa, synthetic construct
DNKRGDFQNT

SEQ ID NO: 144857 - protein, 10 aa, synthetic construct
DNLRGDFQNT

SEQ ID NO: 144858 - protein, 10 aa, synthetic construct
DNMRGDFQNT

SEQ ID NO: 144859 - protein, 10 aa, synthetic construct
DNPRGDFQNT

SEQ ID NO: 144860 - protein, 10 aa, synthetic construct
DNRRGDFQNT

SEQ ID NO: 144861 - protein, 10 aa, synthetic construct
DNVRGDFQNT

SEQ ID NO: 144862 - protein, 10 aa, synthetic construct
DNWRGDFQNT

SEQ ID NO: 144863 - protein, 10 aa, synthetic construct
DNYRGDFQNT

SEQ ID NO: 144864 - protein, 10 aa, synthetic construct
DQARGDFQNT

SEQ ID NO: 144865 - protein, 10 aa, synthetic construct
DQDRGDFQNT

SEQ ID NO: 144866 - protein, 10 aa, synthetic construct
DQERGDFQNT

SEQ ID NO: 144867 - protein, 10 aa, synthetic construct
DQNRGDFQNT

SEQ ID NO: 144868 - protein, 10 aa, synthetic construct
DQQRGDFQNT

SEQ ID NO: 144869 - protein, 10 aa, synthetic construct
DQSRGDFQNT

SEQ ID NO: 144870 - protein, 10 aa, synthetic construct
DQTRGDFQNT

SEQ ID NO: 144871 - protein, 10 aa, synthetic construct
DQFRGDFQNT

SEQ ID NO: 144872 - protein, 10 aa, synthetic construct
DQGRGDFQNT

SEQ ID NO: 144873 - protein, 10 aa, synthetic construct
DQHRGDFQNT

SEQ ID NO: 144874 - protein, 10 aa, synthetic construct
DQIRGDFQNT

SEQ ID NO: 144875 - protein, 10 aa, synthetic construct
DQKRGDFQNT

SEQ ID NO: 144876 - protein, 10 aa, synthetic construct
DQLRGDFQNT

SEQ ID NO: 144877 - protein, 10 aa, synthetic construct
DQMRGDFQNT

SEQ ID NO: 144878 - protein, 10 aa, synthetic construct
DQPRGDFQNT

SEQ ID NO: 144879 - protein, 10 aa, synthetic construct
DQRRGDFQNT

SEQ ID NO: 144880 - protein, 10 aa, synthetic construct
DQVRGDFQNT

SEQ ID NO: 144881 - protein, 10 aa, synthetic construct
DQWRGDFQNT

SEQ ID NO: 144882 - protein, 10 aa, synthetic construct
DQYRGDFQNT

SEQ ID NO: 144883 - protein, 10 aa, synthetic construct
DSARGDFQNT

SEQ ID NO: 144884 - protein, 10 aa, synthetic construct
DSDRGDFQNT

SEQ ID NO: 144885 - protein, 10 aa, synthetic construct
DSERGDFQNT

SEQ ID NO: 144886 - protein, 10 aa, synthetic construct
DSNRGDFQNT

SEQ ID NO: 144887 - protein, 10 aa, synthetic construct
DSQRGDFQNT

SEQ ID NO: 144888 - protein, 10 aa, synthetic construct
DSSRGDFQNT

SEQ ID NO: 144889 - protein, 10 aa, synthetic construct
DSTRGDFQNT

SEQ ID NO: 144890 - protein, 10 aa, synthetic construct
DSFRGDFQNT

SEQ ID NO: 144891 - protein, 10 aa, synthetic construct
DSGRGDFQNT

SEQ ID NO: 144892 - protein, 10 aa, synthetic construct
DSHRGDFQNT

SEQ ID NO: 144893 - protein, 10 aa, synthetic construct
DSIRGDFQNT

SEQ ID NO: 144894 - protein, 10 aa, synthetic construct
DSKRGDFQNT

SEQ ID NO: 144895 - protein, 10 aa, synthetic construct
DSLRGDFQNT

SEQ ID NO: 144896 - protein, 10 aa, synthetic construct
DSMRGDFQNT

SEQ ID NO: 144897 - protein, 10 aa, synthetic construct
DSPRGDFQNT

SEQ ID NO: 144898 - protein, 10 aa, synthetic construct
DSRRGDFQNT

SEQ ID NO: 144899 - protein, 10 aa, synthetic construct
DSVRGDFQNT

SEQ ID NO: 144900 - protein, 10 aa, synthetic construct
DSWRGDFQNT

SEQ ID NO: 144901 - protein, 10 aa, synthetic construct
DSYRGDFQNT

SEQ ID NO: 144902 - protein, 10 aa, synthetic construct
DTARGDFQNT

SEQ ID NO: 144903 - protein, 10 aa, synthetic construct
DTDRGDFQNT

SEQ ID NO: 144904 - protein, 10 aa, synthetic construct
DTERGDFQNT

SEQ ID NO: 144905 - protein, 10 aa, synthetic construct
DTNRGDFQNT

SEQ ID NO: 144906 - protein, 10 aa, synthetic construct
DTQRGDFQNT

SEQ ID NO: 144907 - protein, 10 aa, synthetic construct
DTSRGDFQNT

SEQ ID NO: 144908 - protein, 10 aa, synthetic construct
DTTRGDFQNT

SEQ ID NO: 144909 - protein, 10 aa, synthetic construct
DTFRGDFQNT

SEQ ID NO: 144910 - protein, 10 aa, synthetic construct
DTGRGDFQNT

SEQ ID NO: 144911 - protein, 10 aa, synthetic construct
DTHRGDFQNT

SEQ ID NO: 144912 - protein, 10 aa, synthetic construct
DTIRGDFQNT

SEQ ID NO: 144913 - protein, 10 aa, synthetic construct
DTKRGDFQNT

SEQ ID NO: 144914 - protein, 10 aa, synthetic construct
DTLRGDFQNT

SEQ ID NO: 144915 - protein, 10 aa, synthetic construct
DTMRGDFQNT

SEQ ID NO: 144916 - protein, 10 aa, synthetic construct
DTPRGDFQNT

SEQ ID NO: 144917 - protein, 10 aa, synthetic construct
DTRRGDFQNT

SEQ ID NO: 144918 - protein, 10 aa, synthetic construct
DTVRGDFQNT

SEQ ID NO: 144919 - protein, 10 aa, synthetic construct
DTWRGDFQNT

SEQ ID NO: 144920 - protein, 10 aa, synthetic construct
DTYRGDFQNT

SEQ ID NO: 144921 - protein, 10 aa, synthetic construct
DFARGDFQNT

SEQ ID NO: 144922 - protein, 10 aa, synthetic construct
DFDRGDFQNT

SEQ ID NO: 144923 - protein, 10 aa, synthetic construct
DFERGDFQNT

SEQ ID NO: 144924 - protein, 10 aa, synthetic construct
DFNRGDFQNT

SEQ ID NO: 144925 - protein, 10 aa, synthetic construct
DFQRGDFQNT

SEQ ID NO: 144926 - protein, 10 aa, synthetic construct
DFSRGDFQNT

SEQ ID NO: 144927 - protein, 10 aa, synthetic construct
DFTRGDFQNT

SEQ ID NO: 144928 - protein, 10 aa, synthetic construct
DFFRGDFQNT

SEQ ID NO: 144929 - protein, 10 aa, synthetic construct
DFGRGDFQNT

SEQ ID NO: 144930 - protein, 10 aa, synthetic construct
DFHRGDFQNT

SEQ ID NO: 144931 - protein, 10 aa, synthetic construct
DFIRGDFQNT

SEQ ID NO: 144932 - protein, 10 aa, synthetic construct
DFKRGDFQNT

SEQ ID NO: 144933 - protein, 10 aa, synthetic construct
DFLRGDFQNT

SEQ ID NO: 144934 - protein, 10 aa, synthetic construct
DFMRGDFQNT

SEQ ID NO: 144935 - protein, 10 aa, synthetic construct
DFPRGDFQNT

SEQ ID NO: 144936 - protein, 10 aa, synthetic construct
DFRRGDFQNT

SEQ ID NO: 144937 - protein, 10 aa, synthetic construct
DFVRGDFQNT

SEQ ID NO: 144938 - protein, 10 aa, synthetic construct
DFWRGDFQNT

SEQ ID NO: 144939 - protein, 10 aa, synthetic construct
DFYRGDFQNT

SEQ ID NO: 144940 - protein, 10 aa, synthetic construct
DGARGDFQNT

SEQ ID NO: 144941 - protein, 10 aa, synthetic construct
DGDRGDFQNT

SEQ ID NO: 144942 - protein, 10 aa, synthetic construct
DGERGDFQNT

SEQ ID NO: 144943 - protein, 10 aa, synthetic construct
DGNRGDFQNT

SEQ ID NO: 144944 - protein, 10 aa, synthetic construct
DGQRGDFQNT

SEQ ID NO: 144945 - protein, 10 aa, synthetic construct
DGSRGDFQNT

SEQ ID NO: 144946 - protein, 10 aa, synthetic construct
DGTRGDFQNT

SEQ ID NO: 144947 - protein, 10 aa, synthetic construct
DGFRGDFQNT

SEQ ID NO: 144948 - protein, 10 aa, synthetic construct
DGGRGDFQNT

SEQ ID NO: 144949 - protein, 10 aa, synthetic construct
DGHRGDFQNT

SEQ ID NO: 144950 - protein, 10 aa, synthetic construct
DGIRGDFQNT

SEQ ID NO: 144951 - protein, 10 aa, synthetic construct
DGKRGDFQNT

SEQ ID NO: 144952 - protein, 10 aa, synthetic construct
DGLRGDFQNT

SEQ ID NO: 144953 - protein, 10 aa, synthetic construct
DGMRGDFQNT

SEQ ID NO: 144954 - protein, 10 aa, synthetic construct
DGPRGDFQNT

SEQ ID NO: 144955 - protein, 10 aa, synthetic construct
DGRRGDFQNT

SEQ ID NO: 144956 - protein, 10 aa, synthetic construct
DGVRGDFQNT

SEQ ID NO: 144957 - protein, 10 aa, synthetic construct
DGWRGDFQNT

SEQ ID NO: 144958 - protein, 10 aa, synthetic construct
DGYRGDFQNT

SEQ ID NO: 144959 - protein, 10 aa, synthetic construct
DHARGDFQNT

SEQ ID NO: 144960 - protein, 10 aa, synthetic construct
DHDRGDFQNT

SEQ ID NO: 144961 - protein, 10 aa, synthetic construct
DHERGDFQNT

SEQ ID NO: 144962 - protein, 10 aa, synthetic construct
DHNRGDFQNT

SEQ ID NO: 144963 - protein, 10 aa, synthetic construct
DHQRGDFQNT

SEQ ID NO: 144964 - protein, 10 aa, synthetic construct
DHSRGDFQNT

SEQ ID NO: 144965 - protein, 10 aa, synthetic construct
DHTRGDFQNT

SEQ ID NO: 144966 - protein, 10 aa, synthetic construct
DHFRGDFQNT

SEQ ID NO: 144967 - protein, 10 aa, synthetic construct
DHGRGDFQNT

SEQ ID NO: 144968 - protein, 10 aa, synthetic construct
DHHRGDFQNT

SEQ ID NO: 144969 - protein, 10 aa, synthetic construct
DHIRGDFQNT

SEQ ID NO: 144970 - protein, 10 aa, synthetic construct
DHKRGDFQNT

SEQ ID NO: 144971 - protein, 10 aa, synthetic construct
DHLRGDFQNT

SEQ ID NO: 144972 - protein, 10 aa, synthetic construct
DHMRGDFQNT

SEQ ID NO: 144973 - protein, 10 aa, synthetic construct
DHPRGDFQNT

SEQ ID NO: 144974 - protein, 10 aa, synthetic construct
DHRRGDFQNT

SEQ ID NO: 144975 - protein, 10 aa, synthetic construct
DHVRGDFQNT

SEQ ID NO: 144976 - protein, 10 aa, synthetic construct
DHWRGDFQNT

SEQ ID NO: 144977 - protein, 10 aa, synthetic construct
DHYRGDFQNT

SEQ ID NO: 144978 - protein, 10 aa, synthetic construct
DIARGDFQNT

SEQ ID NO: 144979 - protein, 10 aa, synthetic construct
DIDRGDFQNT

SEQ ID NO: 144980 - protein, 10 aa, synthetic construct
DIERGDFQNT

SEQ ID NO: 144981 - protein, 10 aa, synthetic construct
DINRGDFQNT

SEQ ID NO: 144982 - protein, 10 aa, synthetic construct
DIQRGDFQNT

SEQ ID NO: 144983 - protein, 10 aa, synthetic construct
DISRGDFQNT

SEQ ID NO: 144984 - protein, 10 aa, synthetic construct
DITRGDFQNT

SEQ ID NO: 144985 - protein, 10 aa, synthetic construct
DIFRGDFQNT

SEQ ID NO: 144986 - protein, 10 aa, synthetic construct
DIGRGDFQNT

SEQ ID NO: 144987 - protein, 10 aa, synthetic construct
DIHRGDFQNT

SEQ ID NO: 144988 - protein, 10 aa, synthetic construct
DIIRGDFQNT

SEQ ID NO: 144989 - protein, 10 aa, synthetic construct
DIKRGDFQNT

SEQ ID NO: 144990 - protein, 10 aa, synthetic construct
DILRGDFQNT

SEQ ID NO: 144991 - protein, 10 aa, synthetic construct
DIMRGDFQNT

SEQ ID NO: 144992 - protein, 10 aa, synthetic construct
DIPRGDFQNT

SEQ ID NO: 144993 - protein, 10 aa, synthetic construct
DIRRGDFQNT

SEQ ID NO: 144994 - protein, 10 aa, synthetic construct
DIVRGDFQNT

SEQ ID NO: 144995 - protein, 10 aa, synthetic construct
DIWRGDFQNT

SEQ ID NO: 144996 - protein, 10 aa, synthetic construct
DIYRGDFQNT

SEQ ID NO: 144997 - protein, 10 aa, synthetic construct
DKARGDFQNT

SEQ ID NO: 144998 - protein, 10 aa, synthetic construct
DKDRGDFQNT

SEQ ID NO: 144999 - protein, 10 aa, synthetic construct
DKERGDFQNT

SEQ ID NO: 145000 - protein, 10 aa, synthetic construct
DKNRGDFQNT

SEQ ID NO: 145001 - protein, 10 aa, synthetic construct
DKQRGDFQNT

SEQ ID NO: 145002 - protein, 10 aa, synthetic construct
DKSRGDFQNT

SEQ ID NO: 145003 - protein, 10 aa, synthetic construct
DKTRGDFQNT

SEQ ID NO: 145004 - protein, 10 aa, synthetic construct
DKFRGDFQNT

SEQ ID NO: 145005 - protein, 10 aa, synthetic construct
DKGRGDFQNT

SEQ ID NO: 145006 - protein, 10 aa, synthetic construct
DKHRGDFQNT

SEQ ID NO: 145007 - protein, 10 aa, synthetic construct
DKIRGDFQNT

SEQ ID NO: 145008 - protein, 10 aa, synthetic construct
DKKRGDFQNT

SEQ ID NO: 145009 - protein, 10 aa, synthetic construct
DKLRGDFQNT

SEQ ID NO: 145010 - protein, 10 aa, synthetic construct
DKMRGDFQNT

SEQ ID NO: 145011 - protein, 10 aa, synthetic construct
DKPRGDFQNT

SEQ ID NO: 145012 - protein, 10 aa, synthetic construct
DKRRGDFQNT

SEQ ID NO: 145013 - protein, 10 aa, synthetic construct
DKVRGDFQNT

SEQ ID NO: 145014 - protein, 10 aa, synthetic construct
DKWRGDFQNT

SEQ ID NO: 145015 - protein, 10 aa, synthetic construct
DKYRGDFQNT

SEQ ID NO: 145016 - protein, 10 aa, synthetic construct
DLARGDFQNT

SEQ ID NO: 145017 - protein, 10 aa, synthetic construct
DLDRGDFQNT

SEQ ID NO: 145018 - protein, 10 aa, synthetic construct
DLERGDFQNT

SEQ ID NO: 145019 - protein, 10 aa, synthetic construct
DLNRGDFQNT

SEQ ID NO: 145020 - protein, 10 aa, synthetic construct
DLQRGDFQNT

SEQ ID NO: 145021 - protein, 10 aa, synthetic construct
DLSRGDFQNT

SEQ ID NO: 145022 - protein, 10 aa, synthetic construct
DLTRGDFQNT

SEQ ID NO: 145023 - protein, 10 aa, synthetic construct
DLFRGDFQNT

SEQ ID NO: 145024 - protein, 10 aa, synthetic construct
DLGRGDFQNT

SEQ ID NO: 145025 - protein, 10 aa, synthetic construct
DLHRGDFQNT

SEQ ID NO: 145026 - protein, 10 aa, synthetic construct
DLIRGDFQNT

SEQ ID NO: 145027 - protein, 10 aa, synthetic construct
DLKRGDFQNT

SEQ ID NO: 145028 - protein, 10 aa, synthetic construct
DLLRGDFQNT

SEQ ID NO: 145029 - protein, 10 aa, synthetic construct
DLMRGDFQNT

SEQ ID NO: 145030 - protein, 10 aa, synthetic construct
DLPRGDFQNT

SEQ ID NO: 145031 - protein, 10 aa, synthetic construct
DLRRGDFQNT

SEQ ID NO: 145032 - protein, 10 aa, synthetic construct
DLVRGDFQNT

SEQ ID NO: 145033 - protein, 10 aa, synthetic construct
DLWRGDFQNT

SEQ ID NO: 145034 - protein, 10 aa, synthetic construct
DLYRGDFQNT

SEQ ID NO: 145035 - protein, 10 aa, synthetic construct
DMARGDFQNT

SEQ ID NO: 145036 - protein, 10 aa, synthetic construct
DMDRGDFQNT

SEQ ID NO: 145037 - protein, 10 aa, synthetic construct
DMERGDFQNT

SEQ ID NO: 145038 - protein, 10 aa, synthetic construct
DMNRGDFQNT

SEQ ID NO: 145039 - protein, 10 aa, synthetic construct
DMQRGDFQNT

SEQ ID NO: 145040 - protein, 10 aa, synthetic construct
DMSRGDFQNT

SEQ ID NO: 145041 - protein, 10 aa, synthetic construct
DMTRGDFQNT

SEQ ID NO: 145042 - protein, 10 aa, synthetic construct
DMFRGDFQNT

SEQ ID NO: 145043 - protein, 10 aa, synthetic construct
DMGRGDFQNT

SEQ ID NO: 145044 - protein, 10 aa, synthetic construct
DMHRGDFQNT

SEQ ID NO: 145045 - protein, 10 aa, synthetic construct
DMIRGDFQNT

SEQ ID NO: 145046 - protein, 10 aa, synthetic construct
DMKRGDFQNT

SEQ ID NO: 145047 - protein, 10 aa, synthetic construct
DMLRGDFQNT

SEQ ID NO: 145048 - protein, 10 aa, synthetic construct
DMMRGDFQNT

SEQ ID NO: 145049 - protein, 10 aa, synthetic construct
DMPRGDFQNT

SEQ ID NO: 145050 - protein, 10 aa, synthetic construct
DMRRGDFQNT

SEQ ID NO: 145051 - protein, 10 aa, synthetic construct
DMVRGDFQNT

SEQ ID NO: 145052 - protein, 10 aa, synthetic construct
DMWRGDFQNT

SEQ ID NO: 145053 - protein, 10 aa, synthetic construct
DMYRGDFQNT

SEQ ID NO: 145054 - protein, 10 aa, synthetic construct
DPARGDFQNT

SEQ ID NO: 145055 - protein, 10 aa, synthetic construct
DPDRGDFQNT

SEQ ID NO: 145056 - protein, 10 aa, synthetic construct
DPERGDFQNT

SEQ ID NO: 145057 - protein, 10 aa, synthetic construct
DPNRGDFQNT

SEQ ID NO: 145058 - protein, 10 aa, synthetic construct
DPQRGDFQNT

SEQ ID NO: 145059 - protein, 10 aa, synthetic construct
DPSRGDFQNT

SEQ ID NO: 145060 - protein, 10 aa, synthetic construct
DPTRGDFQNT

SEQ ID NO: 145061 - protein, 10 aa, synthetic construct
DPFRGDFQNT

SEQ ID NO: 145062 - protein, 10 aa, synthetic construct
DPGRGDFQNT

SEQ ID NO: 145063 - protein, 10 aa, synthetic construct
DPHRGDFQNT

SEQ ID NO: 145064 - protein, 10 aa, synthetic construct
DPIRGDFQNT

SEQ ID NO: 145065 - protein, 10 aa, synthetic construct
DPKRGDFQNT

SEQ ID NO: 145066 - protein, 10 aa, synthetic construct
DPLRGDFQNT

SEQ ID NO: 145067 - protein, 10 aa, synthetic construct
DPMRGDFQNT

SEQ ID NO: 145068 - protein, 10 aa, synthetic construct
DPPRGDFQNT

SEQ ID NO: 145069 - protein, 10 aa, synthetic construct
DPRRGDFQNT

SEQ ID NO: 145070 - protein, 10 aa, synthetic construct
DPVRGDFQNT

SEQ ID NO: 145071 - protein, 10 aa, synthetic construct
DPWRGDFQNT

SEQ ID NO: 145072 - protein, 10 aa, synthetic construct
DPYRGDFQNT

SEQ ID NO: 145073 - protein, 10 aa, synthetic construct
DRARGDFQNT

SEQ ID NO: 145074 - protein, 10 aa, synthetic construct
DRDRGDFQNT

SEQ ID NO: 145075 - protein, 10 aa, synthetic construct
DRERGDFQNT

SEQ ID NO: 145076 - protein, 10 aa, synthetic construct
DRNRGDFQNT

SEQ ID NO: 145077 - protein, 10 aa, synthetic construct
DRQRGDFQNT

SEQ ID NO: 145078 - protein, 10 aa, synthetic construct
DRSRGDFQNT

SEQ ID NO: 145079 - protein, 10 aa, synthetic construct
DRTRGDFQNT

SEQ ID NO: 145080 - protein, 10 aa, synthetic construct
DRFRGDFQNT

SEQ ID NO: 145081 - protein, 10 aa, synthetic construct
DRGRGDFQNT

SEQ ID NO: 145082 - protein, 10 aa, synthetic construct
DRHRGDFQNT

SEQ ID NO: 145083 - protein, 10 aa, synthetic construct
DRIRGDFQNT

SEQ ID NO: 145084 - protein, 10 aa, synthetic construct
DRKRGDFQNT

SEQ ID NO: 145085 - protein, 10 aa, synthetic construct
DRLRGDFQNT

SEQ ID NO: 145086 - protein, 10 aa, synthetic construct
DRMRGDFQNT

SEQ ID NO: 145087 - protein, 10 aa, synthetic construct
DRPRGDFQNT

SEQ ID NO: 145088 - protein, 10 aa, synthetic construct
DRRRGDFQNT

SEQ ID NO: 145089 - protein, 10 aa, synthetic construct
DRVRGDFQNT

SEQ ID NO: 145090 - protein, 10 aa, synthetic construct
DRWRGDFQNT

SEQ ID NO: 145091 - protein, 10 aa, synthetic construct
DRYRGDFQNT

SEQ ID NO: 145092 - protein, 10 aa, synthetic construct
DVARGDFQNT

SEQ ID NO: 145093 - protein, 10 aa, synthetic construct
DVDRGDFQNT

SEQ ID NO: 145094 - protein, 10 aa, synthetic construct
DVERGDFQNT

SEQ ID NO: 145095 - protein, 10 aa, synthetic construct
DVNRGDFQNT

SEQ ID NO: 145096 - protein, 10 aa, synthetic construct
DVQRGDFQNT

SEQ ID NO: 145097 - protein, 10 aa, synthetic construct
DVSRGDFQNT

SEQ ID NO: 145098 - protein, 10 aa, synthetic construct
DVTRGDFQNT

SEQ ID NO: 145099 - protein, 10 aa, synthetic construct
DVFRGDFQNT

SEQ ID NO: 145100 - protein, 10 aa, synthetic construct
DVGRGDFQNT

SEQ ID NO: 145101 - protein, 10 aa, synthetic construct
DVHRGDFQNT

SEQ ID NO: 145102 - protein, 10 aa, synthetic construct
DVIRGDFQNT

SEQ ID NO: 145103 - protein, 10 aa, synthetic construct
DVKRGDFQNT

SEQ ID NO: 145104 - protein, 10 aa, synthetic construct
DVLRGDFQNT

SEQ ID NO: 145105 - protein, 10 aa, synthetic construct
DVMRGDFQNT

SEQ ID NO: 145106 - protein, 10 aa, synthetic construct
DVPRGDFQNT

SEQ ID NO: 145107 - protein, 10 aa, synthetic construct
DVRRGDFQNT

SEQ ID NO: 145108 - protein, 10 aa, synthetic construct
DVVRGDFQNT

SEQ ID NO: 145109 - protein, 10 aa, synthetic construct
DVWRGDFQNT

SEQ ID NO: 145110 - protein, 10 aa, synthetic construct
DVYRGDFQNT

SEQ ID NO: 145111 - protein, 10 aa, synthetic construct
DWARGDFQNT

SEQ ID NO: 145112 - protein, 10 aa, synthetic construct
DWDRGDFQNT

SEQ ID NO: 145113 - protein, 10 aa, synthetic construct
DWERGDFQNT

SEQ ID NO: 145114 - protein, 10 aa, synthetic construct
DWNRGDFQNT

SEQ ID NO: 145115 - protein, 10 aa, synthetic construct
DWQRGDFQNT

SEQ ID NO: 145116 - protein, 10 aa, synthetic construct
DWSRGDFQNT

SEQ ID NO: 145117 - protein, 10 aa, synthetic construct
DWTRGDFQNT

SEQ ID NO: 145118 - protein, 10 aa, synthetic construct
DWFRGDFQNT

SEQ ID NO: 145119 - protein, 10 aa, synthetic construct
DWGRGDFQNT

SEQ ID NO: 145120 - protein, 10 aa, synthetic construct
DWHRGDFQNT

SEQ ID NO: 145121 - protein, 10 aa, synthetic construct
DWIRGDFQNT

SEQ ID NO: 145122 - protein, 10 aa, synthetic construct
DWKRGDFQNT

SEQ ID NO: 145123 - protein, 10 aa, synthetic construct
DWLRGDFQNT

SEQ ID NO: 145124 - protein, 10 aa, synthetic construct
DWMRGDFQNT

SEQ ID NO: 145125 - protein, 10 aa, synthetic construct
DWPRGDFQNT

SEQ ID NO: 145126 - protein, 10 aa, synthetic construct
DWRRGDFQNT

SEQ ID NO: 145127 - protein, 10 aa, synthetic construct
DWVRGDFQNT

SEQ ID NO: 145128 - protein, 10 aa, synthetic construct
DWWRGDFQNT

SEQ ID NO: 145129 - protein, 10 aa, synthetic construct
DWYRGDFQNT

SEQ ID NO: 145130 - protein, 10 aa, synthetic construct
DYARGDFQNT

SEQ ID NO: 145131 - protein, 10 aa, synthetic construct
DYDRGDFQNT

SEQ ID NO: 145132 - protein, 10 aa, synthetic construct
DYERGDFQNT

SEQ ID NO: 145133 - protein, 10 aa, synthetic construct
DYNRGDFQNT

SEQ ID NO: 145134 - protein, 10 aa, synthetic construct
DYQRGDFQNT

SEQ ID NO: 145135 - protein, 10 aa, synthetic construct
DYSRGDFQNT

SEQ ID NO: 145136 - protein, 10 aa, synthetic construct
DYTRGDFQNT

SEQ ID NO: 145137 - protein, 10 aa, synthetic construct
DYFRGDFQNT

SEQ ID NO: 145138 - protein, 10 aa, synthetic construct
DYGRGDFQNT

SEQ ID NO: 145139 - protein, 10 aa, synthetic construct
DYHRGDFQNT

SEQ ID NO: 145140 - protein, 10 aa, synthetic construct
DYIRGDFQNT

SEQ ID NO: 145141 - protein, 10 aa, synthetic construct
DYKRGDFQNT

SEQ ID NO: 145142 - protein, 10 aa, synthetic construct
DYLRGDFQNT

SEQ ID NO: 145143 - protein, 10 aa, synthetic construct
DYMRGDFQNT

SEQ ID NO: 145144 - protein, 10 aa, synthetic construct
DYPRGDFQNT

SEQ ID NO: 145145 - protein, 10 aa, synthetic construct
DYRRGDFQNT

SEQ ID NO: 145146 - protein, 10 aa, synthetic construct
DYVRGDFQNT

SEQ ID NO: 145147 - protein, 10 aa, synthetic construct
DYWRGDFQNT

SEQ ID NO: 145148 - protein, 10 aa, synthetic construct
DYYRGDFQNT

SEQ ID NO: 145149 - protein, 10 aa, synthetic construct
EAARGDFQNT

SEQ ID NO: 145150 - protein, 10 aa, synthetic construct
EADRGDFQNT

SEQ ID NO: 145151 - protein, 10 aa, synthetic construct
EAERGDFQNT

SEQ ID NO: 145152 - protein, 10 aa, synthetic construct
EANRGDFQNT

SEQ ID NO: 145153 - protein, 10 aa, synthetic construct
EAQRGDFQNT

SEQ ID NO: 145154 - protein, 10 aa, synthetic construct
EASRGDFQNT

SEQ ID NO: 145155 - protein, 10 aa, synthetic construct
EATRGDFQNT

SEQ ID NO: 145156 - protein, 10 aa, synthetic construct
EAFRGDFQNT

SEQ ID NO: 145157 - protein, 10 aa, synthetic construct
EAGRGDFQNT

SEQ ID NO: 145158 - protein, 10 aa, synthetic construct
EAHRGDFQNT

SEQ ID NO: 145159 - protein, 10 aa, synthetic construct
EAIRGDFQNT

SEQ ID NO: 145160 - protein, 10 aa, synthetic construct
EAKRGDFQNT

SEQ ID NO: 145161 - protein, 10 aa, synthetic construct
EALRGDFQNT

SEQ ID NO: 145162 - protein, 10 aa, synthetic construct
EAMRGDFQNT

SEQ ID NO: 145163 - protein, 10 aa, synthetic construct
EAPRGDFQNT

SEQ ID NO: 145164 - protein, 10 aa, synthetic construct
EARRGDFQNT

SEQ ID NO: 145165 - protein, 10 aa, synthetic construct
EAVRGDFQNT

SEQ ID NO: 145166 - protein, 10 aa, synthetic construct
EAWRGDFQNT

SEQ ID NO: 145167 - protein, 10 aa, synthetic construct
EAYRGDFQNT

SEQ ID NO: 145168 - protein, 10 aa, synthetic construct
EDARGDFQNT

SEQ ID NO: 145169 - protein, 10 aa, synthetic construct
EDDRGDFQNT

SEQ ID NO: 145170 - protein, 10 aa, synthetic construct
EDERGDFQNT

SEQ ID NO: 145171 - protein, 10 aa, synthetic construct
EDNRGDFQNT

SEQ ID NO: 145172 - protein, 10 aa, synthetic construct
EDQRGDFQNT

SEQ ID NO: 145173 - protein, 10 aa, synthetic construct
EDSRGDFQNT

SEQ ID NO: 145174 - protein, 10 aa, synthetic construct
EDTRGDFQNT

SEQ ID NO: 145175 - protein, 10 aa, synthetic construct
EDFRGDFQNT

SEQ ID NO: 145176 - protein, 10 aa, synthetic construct
EDGRGDFQNT

SEQ ID NO: 145177 - protein, 10 aa, synthetic construct
EDHRGDFQNT

SEQ ID NO: 145178 - protein, 10 aa, synthetic construct
EDIRGDFQNT

SEQ ID NO: 145179 - protein, 10 aa, synthetic construct
EDKRGDFQNT

SEQ ID NO: 145180 - protein, 10 aa, synthetic construct
EDLRGDFQNT

SEQ ID NO: 145181 - protein, 10 aa, synthetic construct
EDMRGDFQNT

SEQ ID NO: 145182 - protein, 10 aa, synthetic construct
EDPRGDFQNT

SEQ ID NO: 145183 - protein, 10 aa, synthetic construct
EDRRGDFQNT

SEQ ID NO: 145184 - protein, 10 aa, synthetic construct
EDVRGDFQNT

SEQ ID NO: 145185 - protein, 10 aa, synthetic construct
EDWRGDFQNT

SEQ ID NO: 145186 - protein, 10 aa, synthetic construct
EDYRGDFQNT

SEQ ID NO: 145187 - protein, 10 aa, synthetic construct
EEARGDFQNT

SEQ ID NO: 145188 - protein, 10 aa, synthetic construct
EEDRGDFQNT

SEQ ID NO: 145189 - protein, 10 aa, synthetic construct
EEERGDFQNT

SEQ ID NO: 145190 - protein, 10 aa, synthetic construct
EENRGDFQNT

SEQ ID NO: 145191 - protein, 10 aa, synthetic construct
EEQRGDFQNT

SEQ ID NO: 145192 - protein, 10 aa, synthetic construct
EESRGDFQNT

SEQ ID NO: 145193 - protein, 10 aa, synthetic construct
EETRGDFQNT

SEQ ID NO: 145194 - protein, 10 aa, synthetic construct
EEFRGDFQNT

SEQ ID NO: 145195 - protein, 10 aa, synthetic construct
EEGRGDFQNT

SEQ ID NO: 145196 - protein, 10 aa, synthetic construct
EEHRGDFQNT

SEQ ID NO: 145197 - protein, 10 aa, synthetic construct
EEIRGDFQNT

SEQ ID NO: 145198 - protein, 10 aa, synthetic construct
EEKRGDFQNT

SEQ ID NO: 145199 - protein, 10 aa, synthetic construct
EELRGDFQNT

SEQ ID NO: 145200 - protein, 10 aa, synthetic construct
EEMRGDFQNT

SEQ ID NO: 145201 - protein, 10 aa, synthetic construct
EEPRGDFQNT

SEQ ID NO: 145202 - protein, 10 aa, synthetic construct
EERRGDFQNT

SEQ ID NO: 145203 - protein, 10 aa, synthetic construct
EEVRGDFQNT

SEQ ID NO: 145204 - protein, 10 aa, synthetic construct
EEWRGDFQNT

SEQ ID NO: 145205 - protein, 10 aa, synthetic construct
EEYRGDFQNT

SEQ ID NO: 145206 - protein, 10 aa, synthetic construct
ENARGDFQNT

SEQ ID NO: 145207 - protein, 10 aa, synthetic construct
ENDRGDFQNT

SEQ ID NO: 145208 - protein, 10 aa, synthetic construct
ENERGDFQNT

SEQ ID NO: 145209 - protein, 10 aa, synthetic construct
ENNRGDFQNT

SEQ ID NO: 145210 - protein, 10 aa, synthetic construct
ENQRGDFQNT

SEQ ID NO: 145211 - protein, 10 aa, synthetic construct
ENSRGDFQNT

SEQ ID NO: 145212 - protein, 10 aa, synthetic construct
ENTRGDFQNT

SEQ ID NO: 145213 - protein, 10 aa, synthetic construct
ENFRGDFQNT

SEQ ID NO: 145214 - protein, 10 aa, synthetic construct
ENGRGDFQNT

SEQ ID NO: 145215 - protein, 10 aa, synthetic construct
ENHRGDFQNT

SEQ ID NO: 145216 - protein, 10 aa, synthetic construct
ENIRGDFQNT

SEQ ID NO: 145217 - protein, 10 aa, synthetic construct
ENKRGDFQNT

SEQ ID NO: 145218 - protein, 10 aa, synthetic construct
ENLRGDFQNT

SEQ ID NO: 145219 - protein, 10 aa, synthetic construct
ENMRGDFQNT

SEQ ID NO: 145220 - protein, 10 aa, synthetic construct
ENPRGDFQNT

SEQ ID NO: 145221 - protein, 10 aa, synthetic construct
ENVRGDFQNT

SEQ ID NO: 145222 - protein, 10 aa, synthetic construct
ENWRGDFQNT

SEQ ID NO: 145223 - protein, 10 aa, synthetic construct
ENYRGDFQNT

SEQ ID NO: 145224 - protein, 10 aa, synthetic construct
EQARGDFQNT

SEQ ID NO: 145225 - protein, 10 aa, synthetic construct
EQDRGDFQNT

SEQ ID NO: 145226 - protein, 10 aa, synthetic construct
EQERGDFQNT

SEQ ID NO: 145227 - protein, 10 aa, synthetic construct
EQNRGDFQNT

SEQ ID NO: 145228 - protein, 10 aa, synthetic construct
EQQRGDFQNT

SEQ ID NO: 145229 - protein, 10 aa, synthetic construct
EQSRGDFQNT

SEQ ID NO: 145230 - protein, 10 aa, synthetic construct
EQTRGDFQNT

SEQ ID NO: 145231 - protein, 10 aa, synthetic construct
EQFRGDFQNT

SEQ ID NO: 145232 - protein, 10 aa, synthetic construct
EQGRGDFQNT

SEQ ID NO: 145233 - protein, 10 aa, synthetic construct
EQHRGDFQNT

SEQ ID NO: 145234 - protein, 10 aa, synthetic construct
EQIRGDFQNT

SEQ ID NO: 145235 - protein, 10 aa, synthetic construct
EQKRGDFQNT

SEQ ID NO: 145236 - protein, 10 aa, synthetic construct
EQLRGDFQNT

SEQ ID NO: 145237 - protein, 10 aa, synthetic construct
EQMRGDFQNT

SEQ ID NO: 145238 - protein, 10 aa, synthetic construct
EQPRGDFQNT

SEQ ID NO: 145239 - protein, 10 aa, synthetic construct
EQRRGDFQNT

SEQ ID NO: 145240 - protein, 10 aa, synthetic construct
EQVRGDFQNT

SEQ ID NO: 145241 - protein, 10 aa, synthetic construct
EQWRGDFQNT

SEQ ID NO: 145242 - protein, 10 aa, synthetic construct
EQYRGDFQNT

SEQ ID NO: 145243 - protein, 10 aa, synthetic construct
ESARGDFQNT

SEQ ID NO: 145244 - protein, 10 aa, synthetic construct
ESDRGDFQNT

SEQ ID NO: 145245 - protein, 10 aa, synthetic construct
ESERGDFQNT

SEQ ID NO: 145246 - protein, 10 aa, synthetic construct
ESNRGDFQNT

SEQ ID NO: 145247 - protein, 10 aa, synthetic construct
ESQRGDFQNT

SEQ ID NO: 145248 - protein, 10 aa, synthetic construct
ESSRGDFQNT

SEQ ID NO: 145249 - protein, 10 aa, synthetic construct
ESTRGDFQNT

SEQ ID NO: 145250 - protein, 10 aa, synthetic construct
ESFRGDFQNT

SEQ ID NO: 145251 - protein, 10 aa, synthetic construct
ESGRGDFQNT

SEQ ID NO: 145252 - protein, 10 aa, synthetic construct
ESHRGDFQNT

SEQ ID NO: 145253 - protein, 10 aa, synthetic construct
ESIRGDFQNT

SEQ ID NO: 145254 - protein, 10 aa, synthetic construct
ESKRGDFQNT

SEQ ID NO: 145255 - protein, 10 aa, synthetic construct
ESLRGDFQNT

SEQ ID NO: 145256 - protein, 10 aa, synthetic construct
ESMRGDFQNT

SEQ ID NO: 145257 - protein, 10 aa, synthetic construct
ESPRGDFQNT

SEQ ID NO: 145258 - protein, 10 aa, synthetic construct
ESRRGDFQNT

SEQ ID NO: 145259 - protein, 10 aa, synthetic construct
ESVRGDFQNT

SEQ ID NO: 145260 - protein, 10 aa, synthetic construct
ESWRGDFQNT

SEQ ID NO: 145261 - protein, 10 aa, synthetic construct
ESYRGDFQNT

SEQ ID NO: 145262 - protein, 10 aa, synthetic construct
ETARGDFQNT

SEQ ID NO: 145263 - protein, 10 aa, synthetic construct
ETDRGDFQNT

SEQ ID NO: 145264 - protein, 10 aa, synthetic construct
ETERGDFQNT

SEQ ID NO: 145265 - protein, 10 aa, synthetic construct
ETNRGDFQNT

SEQ ID NO: 145266 - protein, 10 aa, synthetic construct
ETQRGDFQNT

SEQ ID NO: 145267 - protein, 10 aa, synthetic construct
ETSRGDFQNT

SEQ ID NO: 145268 - protein, 10 aa, synthetic construct
ETTRGDFQNT

SEQ ID NO: 145269 - protein, 10 aa, synthetic construct
ETFRGDFQNT

SEQ ID NO: 145270 - protein, 10 aa, synthetic construct
ETGRGDFQNT

SEQ ID NO: 145271 - protein, 10 aa, synthetic construct
ETHRGDFQNT

SEQ ID NO: 145272 - protein, 10 aa, synthetic construct
ETIRGDFQNT

SEQ ID NO: 145273 - protein, 10 aa, synthetic construct
ETKRGDFQNT

SEQ ID NO: 145274 - protein, 10 aa, synthetic construct
ETLRGDFQNT

SEQ ID NO: 145275 - protein, 10 aa, synthetic construct
ETMRGDFQNT

SEQ ID NO: 145276 - protein, 10 aa, synthetic construct
ETPRGDFQNT

SEQ ID NO: 145277 - protein, 10 aa, synthetic construct
ETRRGDFQNT

SEQ ID NO: 145278 - protein, 10 aa, synthetic construct
ETVRGDFQNT

SEQ ID NO: 145279 - protein, 10 aa, synthetic construct
ETWRGDFQNT

SEQ ID NO: 145280 - protein, 10 aa, synthetic construct
ETYRGDFQNT

SEQ ID NO: 145281 - protein, 10 aa, synthetic construct
EFARGDFQNT

SEQ ID NO: 145282 - protein, 10 aa, synthetic construct
EFDRGDFQNT

SEQ ID NO: 145283 - protein, 10 aa, synthetic construct
EFERGDFQNT

SEQ ID NO: 145284 - protein, 10 aa, synthetic construct
EFNRGDFQNT

SEQ ID NO: 145285 - protein, 10 aa, synthetic construct
EFQRGDFQNT

SEQ ID NO: 145286 - protein, 10 aa, synthetic construct
EFSRGDFQNT

SEQ ID NO: 145287 - protein, 10 aa, synthetic construct
EFTRGDFQNT

SEQ ID NO: 145288 - protein, 10 aa, synthetic construct
EFFRGDFQNT

SEQ ID NO: 145289 - protein, 10 aa, synthetic construct
EFGRGDFQNT

SEQ ID NO: 145290 - protein, 10 aa, synthetic construct
EFHRGDFQNT

SEQ ID NO: 145291 - protein, 10 aa, synthetic construct
EFIRGDFQNT

SEQ ID NO: 145292 - protein, 10 aa, synthetic construct
EFKRGDFQNT

SEQ ID NO: 145293 - protein, 10 aa, synthetic construct
EFLRGDFQNT

SEQ ID NO: 145294 - protein, 10 aa, synthetic construct
EFMRGDFQNT

SEQ ID NO: 145295 - protein, 10 aa, synthetic construct
EFPRGDFQNT

SEQ ID NO: 145296 - protein, 10 aa, synthetic construct
EFRRGDFQNT

SEQ ID NO: 145297 - protein, 10 aa, synthetic construct
EFVRGDFQNT

SEQ ID NO: 145298 - protein, 10 aa, synthetic construct
EFWRGDFQNT

SEQ ID NO: 145299 - protein, 10 aa, synthetic construct
EFYRGDFQNT

SEQ ID NO: 145300 - protein, 10 aa, synthetic construct
EGARGDFQNT

SEQ ID NO: 145301 - protein, 10 aa, synthetic construct
EGDRGDFQNT

SEQ ID NO: 145302 - protein, 10 aa, synthetic construct
EGERGDFQNT

SEQ ID NO: 145303 - protein, 10 aa, synthetic construct
EGNRGDFQNT

SEQ ID NO: 145304 - protein, 10 aa, synthetic construct
EGQRGDFQNT

SEQ ID NO: 145305 - protein, 10 aa, synthetic construct
EGSRGDFQNT

SEQ ID NO: 145306 - protein, 10 aa, synthetic construct
EGTRGDFQNT

SEQ ID NO: 145307 - protein, 10 aa, synthetic construct
EGFRGDFQNT

SEQ ID NO: 145308 - protein, 10 aa, synthetic construct
EGGRGDFQNT

SEQ ID NO: 145309 - protein, 10 aa, synthetic construct
EGHRGDFQNT

SEQ ID NO: 145310 - protein, 10 aa, synthetic construct
EGIRGDFQNT

SEQ ID NO: 145311 - protein, 10 aa, synthetic construct
EGKRGDFQNT

SEQ ID NO: 145312 - protein, 10 aa, synthetic construct
EGLRGDFQNT

SEQ ID NO: 145313 - protein, 10 aa, synthetic construct
EGMRGDFQNT

SEQ ID NO: 145314 - protein, 10 aa, synthetic construct
EGPRGDFQNT

SEQ ID NO: 145315 - protein, 10 aa, synthetic construct
EGRRGDFQNT

SEQ ID NO: 145316 - protein, 10 aa, synthetic construct
EGVRGDFQNT

SEQ ID NO: 145317 - protein, 10 aa, synthetic construct
EGWRGDFQNT

SEQ ID NO: 145318 - protein, 10 aa, synthetic construct
EGYRGDFQNT

SEQ ID NO: 145319 - protein, 10 aa, synthetic construct
EHARGDFQNT

SEQ ID NO: 145320 - protein, 10 aa, synthetic construct
EHDRGDFQNT

SEQ ID NO: 145321 - protein, 10 aa, synthetic construct
EHERGDFQNT

SEQ ID NO: 145322 - protein, 10 aa, synthetic construct
EHNRGDFQNT

SEQ ID NO: 145323 - protein, 10 aa, synthetic construct
EHQRGDFQNT

SEQ ID NO: 145324 - protein, 10 aa, synthetic construct
EHSRGDFQNT

SEQ ID NO: 145325 - protein, 10 aa, synthetic construct
EHTRGDFQNT

SEQ ID NO: 145326 - protein, 10 aa, synthetic construct
EHFRGDFQNT

SEQ ID NO: 145327 - protein, 10 aa, synthetic construct
EHGRGDFQNT

SEQ ID NO: 145328 - protein, 10 aa, synthetic construct
EHHRGDFQNT

SEQ ID NO: 145329 - protein, 10 aa, synthetic construct
EHIRGDFQNT

SEQ ID NO: 145330 - protein, 10 aa, synthetic construct
EHKRGDFQNT

SEQ ID NO: 145331 - protein, 10 aa, synthetic construct
EHLRGDFQNT

SEQ ID NO: 145332 - protein, 10 aa, synthetic construct
EHMRGDFQNT

SEQ ID NO: 145333 - protein, 10 aa, synthetic construct
EHPRGDFQNT

SEQ ID NO: 145334 - protein, 10 aa, synthetic construct
EHRRGDFQNT

SEQ ID NO: 145335 - protein, 10 aa, synthetic construct
EHVRGDFQNT

SEQ ID NO: 145336 - protein, 10 aa, synthetic construct
EHWRGDFQNT

SEQ ID NO: 145337 - protein, 10 aa, synthetic construct
EHYRGDFQNT

SEQ ID NO: 145338 - protein, 10 aa, synthetic construct
EIARGDFQNT

SEQ ID NO: 145339 - protein, 10 aa, synthetic construct
EIDRGDFQNT

SEQ ID NO: 145340 - protein, 10 aa, synthetic construct
EIERGDFQNT

SEQ ID NO: 145341 - protein, 10 aa, synthetic construct
EINRGDFQNT

SEQ ID NO: 145342 - protein, 10 aa, synthetic construct
EIQRGDFQNT

SEQ ID NO: 145343 - protein, 10 aa, synthetic construct
EISRGDFQNT

SEQ ID NO: 145344 - protein, 10 aa, synthetic construct
EITRGDFQNT

SEQ ID NO: 145345 - protein, 10 aa, synthetic construct
EIFRGDFQNT

SEQ ID NO: 145346 - protein, 10 aa, synthetic construct
EIGRGDFQNT

SEQ ID NO: 145347 - protein, 10 aa, synthetic construct
EIHRGDFQNT

SEQ ID NO: 145348 - protein, 10 aa, synthetic construct
EIIRGDFQNT

SEQ ID NO: 145349 - protein, 10 aa, synthetic construct
EIKRGDFQNT

SEQ ID NO: 145350 - protein, 10 aa, synthetic construct
EILRGDFQNT

SEQ ID NO: 145351 - protein, 10 aa, synthetic construct
EIMRGDFQNT

SEQ ID NO: 145352 - protein, 10 aa, synthetic construct
EIPRGDFQNT

SEQ ID NO: 145353 - protein, 10 aa, synthetic construct
EIRRGDFQNT

SEQ ID NO: 145354 - protein, 10 aa, synthetic construct
EIVRGDFQNT

SEQ ID NO: 145355 - protein, 10 aa, synthetic construct
EIWRGDFQNT

SEQ ID NO: 145356 - protein, 10 aa, synthetic construct
EIYRGDFQNT

SEQ ID NO: 145357 - protein, 10 aa, synthetic construct
EKARGDFQNT

SEQ ID NO: 145358 - protein, 10 aa, synthetic construct
EKDRGDFQNT

SEQ ID NO: 145359 - protein, 10 aa, synthetic construct
EKERGDFQNT

SEQ ID NO: 145360 - protein, 10 aa, synthetic construct
EKNRGDFQNT

SEQ ID NO: 145361 - protein, 10 aa, synthetic construct
EKQRGDFQNT

SEQ ID NO: 145362 - protein, 10 aa, synthetic construct
EKSRGDFQNT

SEQ ID NO: 145363 - protein, 10 aa, synthetic construct
EKTRGDFQNT

SEQ ID NO: 145364 - protein, 10 aa, synthetic construct
EKFRGDFQNT

SEQ ID NO: 145365 - protein, 10 aa, synthetic construct
EKGRGDFQNT

SEQ ID NO: 145366 - protein, 10 aa, synthetic construct
EKHRGDFQNT

SEQ ID NO: 145367 - protein, 10 aa, synthetic construct
EKIRGDFQNT

SEQ ID NO: 145368 - protein, 10 aa, synthetic construct
EKKRGDFQNT

SEQ ID NO: 145369 - protein, 10 aa, synthetic construct
EKLRGDFQNT

SEQ ID NO: 145370 - protein, 10 aa, synthetic construct
EKMRGDFQNT

SEQ ID NO: 145371 - protein, 10 aa, synthetic construct
EKPRGDFQNT

SEQ ID NO: 145372 - protein, 10 aa, synthetic construct
EKRRGDFQNT

SEQ ID NO: 145373 - protein, 10 aa, synthetic construct
EKVRGDFQNT

SEQ ID NO: 145374 - protein, 10 aa, synthetic construct
EKWRGDFQNT

SEQ ID NO: 145375 - protein, 10 aa, synthetic construct
EKYRGDFQNT

SEQ ID NO: 145376 - protein, 10 aa, synthetic construct
ELARGDFQNT

SEQ ID NO: 145377 - protein, 10 aa, synthetic construct
ELDRGDFQNT

SEQ ID NO: 145378 - protein, 10 aa, synthetic construct
ELERGDFQNT

SEQ ID NO: 145379 - protein, 10 aa, synthetic construct
ELNRGDFQNT

SEQ ID NO: 145380 - protein, 10 aa, synthetic construct
ELQRGDFQNT

SEQ ID NO: 145381 - protein, 10 aa, synthetic construct
ELSRGDFQNT

SEQ ID NO: 145382 - protein, 10 aa, synthetic construct
ELTRGDFQNT

SEQ ID NO: 145383 - protein, 10 aa, synthetic construct
ELFRGDFQNT

SEQ ID NO: 145384 - protein, 10 aa, synthetic construct
ELGRGDFQNT

SEQ ID NO: 145385 - protein, 10 aa, synthetic construct
ELHRGDFQNT

SEQ ID NO: 145386 - protein, 10 aa, synthetic construct
ELIRGDFQNT

SEQ ID NO: 145387 - protein, 10 aa, synthetic construct
ELKRGDFQNT

SEQ ID NO: 145388 - protein, 10 aa, synthetic construct
ELLRGDFQNT

SEQ ID NO: 145389 - protein, 10 aa, synthetic construct
ELMRGDFQNT

SEQ ID NO: 145390 - protein, 10 aa, synthetic construct
ELPRGDFQNT

SEQ ID NO: 145391 - protein, 10 aa, synthetic construct
ELRRGDFQNT

SEQ ID NO: 145392 - protein, 10 aa, synthetic construct
ELVRGDFQNT

SEQ ID NO: 145393 - protein, 10 aa, synthetic construct
ELWRGDFQNT

SEQ ID NO: 145394 - protein, 10 aa, synthetic construct
ELYRGDFQNT

SEQ ID NO: 145395 - protein, 10 aa, synthetic construct
EMARGDFQNT

SEQ ID NO: 145396 - protein, 10 aa, synthetic construct
EMDRGDFQNT

SEQ ID NO: 145397 - protein, 10 aa, synthetic construct
EMERGDFQNT

SEQ ID NO: 145398 - protein, 10 aa, synthetic construct
EMNRGDFQNT

SEQ ID NO: 145399 - protein, 10 aa, synthetic construct
EMQRGDFQNT

SEQ ID NO: 145400 - protein, 10 aa, synthetic construct
EMSRGDFQNT

SEQ ID NO: 145401 - protein, 10 aa, synthetic construct
EMTRGDFQNT

SEQ ID NO: 145402 - protein, 10 aa, synthetic construct
EMFRGDFQNT

SEQ ID NO: 145403 - protein, 10 aa, synthetic construct
EMGRGDFQNT

SEQ ID NO: 145404 - protein, 10 aa, synthetic construct
EMHRGDFQNT

SEQ ID NO: 145405 - protein, 10 aa, synthetic construct
EMIRGDFQNT

SEQ ID NO: 145406 - protein, 10 aa, synthetic construct
EMKRGDFQNT

SEQ ID NO: 145407 - protein, 10 aa, synthetic construct
EMLRGDFQNT

SEQ ID NO: 145408 - protein, 10 aa, synthetic construct
EMMRGDFQNT

SEQ ID NO: 145409 - protein, 10 aa, synthetic construct
EMPRGDFQNT

SEQ ID NO: 145410 - protein, 10 aa, synthetic construct
EMRRGDFQNT

SEQ ID NO: 145411 - protein, 10 aa, synthetic construct
EMVRGDFQNT

SEQ ID NO: 145412 - protein, 10 aa, synthetic construct
EMWRGDFQNT

SEQ ID NO: 145413 - protein, 10 aa, synthetic construct
EMYRGDFQNT

SEQ ID NO: 145414 - protein, 10 aa, synthetic construct
EPARGDFQNT

SEQ ID NO: 145415 - protein, 10 aa, synthetic construct
EPDRGDFQNT

SEQ ID NO: 145416 - protein, 10 aa, synthetic construct
EPERGDFQNT

SEQ ID NO: 145417 - protein, 10 aa, synthetic construct
EPNRGDFQNT

SEQ ID NO: 145418 - protein, 10 aa, synthetic construct
EPQRGDFQNT

SEQ ID NO: 145419 - protein, 10 aa, synthetic construct
EPSRGDFQNT

SEQ ID NO: 145420 - protein, 10 aa, synthetic construct
EPTRGDFQNT

SEQ ID NO: 145421 - protein, 10 aa, synthetic construct
EPFRGDFQNT

SEQ ID NO: 145422 - protein, 10 aa, synthetic construct
EPGRGDFQNT

SEQ ID NO: 145423 - protein, 10 aa, synthetic construct
EPHRGDFQNT

SEQ ID NO: 145424 - protein, 10 aa, synthetic construct
EPIRGDFQNT

SEQ ID NO: 145425 - protein, 10 aa, synthetic construct
EPKRGDFQNT

SEQ ID NO: 145426 - protein, 10 aa, synthetic construct
EPLRGDFQNT

SEQ ID NO: 145427 - protein, 10 aa, synthetic construct
EPMRGDFQNT

SEQ ID NO: 145428 - protein, 10 aa, synthetic construct
EPPRGDFQNT

SEQ ID NO: 145429 - protein, 10 aa, synthetic construct
EPRRGDFQNT

SEQ ID NO: 145430 - protein, 10 aa, synthetic construct
EPVRGDFQNT

SEQ ID NO: 145431 - protein, 10 aa, synthetic construct
EPWRGDFQNT

SEQ ID NO: 145432 - protein, 10 aa, synthetic construct
EPYRGDFQNT

SEQ ID NO: 145433 - protein, 10 aa, synthetic construct
ERARGDFQNT

SEQ ID NO: 145434 - protein, 10 aa, synthetic construct
ERDRGDFQNT

SEQ ID NO: 145435 - protein, 10 aa, synthetic construct
ERERGDFQNT

SEQ ID NO: 145436 - protein, 10 aa, synthetic construct
ERNRGDFQNT

SEQ ID NO: 145437 - protein, 10 aa, synthetic construct
ERQRGDFQNT

SEQ ID NO: 145438 - protein, 10 aa, synthetic construct
ERSRGDFQNT

SEQ ID NO: 145439 - protein, 10 aa, synthetic construct
ERTRGDFQNT

SEQ ID NO: 145440 - protein, 10 aa, synthetic construct
ERFRGDFQNT

SEQ ID NO: 145441 - protein, 10 aa, synthetic construct
ERGRGDFQNT

SEQ ID NO: 145442 - protein, 10 aa, synthetic construct
ERHRGDFQNT

SEQ ID NO: 145443 - protein, 10 aa, synthetic construct
ERIRGDFQNT

SEQ ID NO: 145444 - protein, 10 aa, synthetic construct
ERKRGDFQNT

SEQ ID NO: 145445 - protein, 10 aa, synthetic construct
ERLRGDFQNT

SEQ ID NO: 145446 - protein, 10 aa, synthetic construct
ERMRGDFQNT

SEQ ID NO: 145447 - protein, 10 aa, synthetic construct
ERPRGDFQNT

SEQ ID NO: 145448 - protein, 10 aa, synthetic construct
ERRRGDFQNT

SEQ ID NO: 145449 - protein, 10 aa, synthetic construct
ERVRGDFQNT

SEQ ID NO: 145450 - protein, 10 aa, synthetic construct
ERWRGDFQNT

SEQ ID NO: 145451 - protein, 10 aa, synthetic construct
ERYRGDFQNT

SEQ ID NO: 145452 - protein, 10 aa, synthetic construct
EVARGDFQNT

SEQ ID NO: 145453 - protein, 10 aa, synthetic construct
EVDRGDFQNT

SEQ ID NO: 145454 - protein, 10 aa, synthetic construct
EVERGDFQNT

SEQ ID NO: 145455 - protein, 10 aa, synthetic construct
EVNRGDFQNT

SEQ ID NO: 145456 - protein, 10 aa, synthetic construct
EVQRGDFQNT

SEQ ID NO: 145457 - protein, 10 aa, synthetic construct
EVSRGDFQNT

SEQ ID NO: 145458 - protein, 10 aa, synthetic construct
EVTRGDFQNT

SEQ ID NO: 145459 - protein, 10 aa, synthetic construct
EVFRGDFQNT

SEQ ID NO: 145460 - protein, 10 aa, synthetic construct
EVGRGDFQNT

SEQ ID NO: 145461 - protein, 10 aa, synthetic construct
EVHRGDFQNT

SEQ ID NO: 145462 - protein, 10 aa, synthetic construct
EVIRGDFQNT

SEQ ID NO: 145463 - protein, 10 aa, synthetic construct
EVKRGDFQNT

SEQ ID NO: 145464 - protein, 10 aa, synthetic construct
EVLRGDFQNT

SEQ ID NO: 145465 - protein, 10 aa, synthetic construct
EVMRGDFQNT

SEQ ID NO: 145466 - protein, 10 aa, synthetic construct
EVPRGDFQNT

SEQ ID NO: 145467 - protein, 10 aa, synthetic construct
EVRRGDFQNT

SEQ ID NO: 145468 - protein, 10 aa, synthetic construct
EVVRGDFQNT

SEQ ID NO: 145469 - protein, 10 aa, synthetic construct
EVWRGDFQNT

SEQ ID NO: 145470 - protein, 10 aa, synthetic construct
EVYRGDFQNT

SEQ ID NO: 145471 - protein, 10 aa, synthetic construct
EWARGDFQNT

SEQ ID NO: 145472 - protein, 10 aa, synthetic construct
EWDRGDFQNT

SEQ ID NO: 145473 - protein, 10 aa, synthetic construct
EWERGDFQNT

SEQ ID NO: 145474 - protein, 10 aa, synthetic construct
EWNRGDFQNT

SEQ ID NO: 145475 - protein, 10 aa, synthetic construct
EWQRGDFQNT

SEQ ID NO: 145476 - protein, 10 aa, synthetic construct
EWSRGDFQNT

SEQ ID NO: 145477 - protein, 10 aa, synthetic construct
EWTRGDFQNT

SEQ ID NO: 145478 - protein, 10 aa, synthetic construct
EWFRGDFQNT

SEQ ID NO: 145479 - protein, 10 aa, synthetic construct
EWGRGDFQNT

SEQ ID NO: 145480 - protein, 10 aa, synthetic construct
EWHRGDFQNT

SEQ ID NO: 145481 - protein, 10 aa, synthetic construct
EWIRGDFQNT

SEQ ID NO: 145482 - protein, 10 aa, synthetic construct
EWKRGDFQNT

SEQ ID NO: 145483 - protein, 10 aa, synthetic construct
EWLRGDFQNT

SEQ ID NO: 145484 - protein, 10 aa, synthetic construct
EWMRGDFQNT

SEQ ID NO: 145485 - protein, 10 aa, synthetic construct
EWPRGDFQNT

SEQ ID NO: 145486 - protein, 10 aa, synthetic construct
EWRRGDFQNT

SEQ ID NO: 145487 - protein, 10 aa, synthetic construct
EWVRGDFQNT

SEQ ID NO: 145488 - protein, 10 aa, synthetic construct
EWWRGDFQNT

SEQ ID NO: 145489 - protein, 10 aa, synthetic construct
EWYRGDFQNT

SEQ ID NO: 145490 - protein, 10 aa, synthetic construct
EYARGDFQNT

SEQ ID NO: 145491 - protein, 10 aa, synthetic construct
EYDRGDFQNT

SEQ ID NO: 145492 - protein, 10 aa, synthetic construct
EYERGDFQNT

SEQ ID NO: 145493 - protein, 10 aa, synthetic construct
EYNRGDFQNT

SEQ ID NO: 145494 - protein, 10 aa, synthetic construct
EYQRGDFQNT

SEQ ID NO: 145495 - protein, 10 aa, synthetic construct
EYSRGDFQNT

SEQ ID NO: 145496 - protein, 10 aa, synthetic construct
EYTRGDFQNT

SEQ ID NO: 145497 - protein, 10 aa, synthetic construct
EYFRGDFQNT

SEQ ID NO: 145498 - protein, 10 aa, synthetic construct
EYGRGDFQNT

SEQ ID NO: 145499 - protein, 10 aa, synthetic construct
EYHRGDFQNT

SEQ ID NO: 145500 - protein, 10 aa, synthetic construct
EYIRGDFQNT

SEQ ID NO: 145501 - protein, 10 aa, synthetic construct
EYKRGDFQNT

SEQ ID NO: 145502 - protein, 10 aa, synthetic construct
EYLRGDFQNT

SEQ ID NO: 145503 - protein, 10 aa, synthetic construct
EYMRGDFQNT

SEQ ID NO: 145504 - protein, 10 aa, synthetic construct
EYPRGDFQNT

SEQ ID NO: 145505 - protein, 10 aa, synthetic construct
EYRRGDFQNT

SEQ ID NO: 145506 - protein, 10 aa, synthetic construct
EYVRGDFQNT

SEQ ID NO: 145507 - protein, 10 aa, synthetic construct
EYWRGDFQNT

SEQ ID NO: 145508 - protein, 10 aa, synthetic construct
EYYRGDFQNT

SEQ ID NO: 145509 - protein, 10 aa, synthetic construct
NAARGDFQNT

SEQ ID NO: 145510 - protein, 10 aa, synthetic construct
NADRGDFQNT

SEQ ID NO: 145511 - protein, 10 aa, synthetic construct
NAERGDFQNT

SEQ ID NO: 145512 - protein, 10 aa, synthetic construct
NANRGDFQNT

SEQ ID NO: 145513 - protein, 10 aa, synthetic construct
NAQRGDFQNT

SEQ ID NO: 145514 - protein, 10 aa, synthetic construct
NASRGDFQNT

SEQ ID NO: 145515 - protein, 10 aa, synthetic construct
NATRGDFQNT

SEQ ID NO: 145516 - protein, 10 aa, synthetic construct
NAFRGDFQNT

SEQ ID NO: 145517 - protein, 10 aa, synthetic construct
NAGRGDFQNT

SEQ ID NO: 145518 - protein, 10 aa, synthetic construct
NAHRGDFQNT

SEQ ID NO: 145519 - protein, 10 aa, synthetic construct
NAIRGDFQNT

SEQ ID NO: 145520 - protein, 10 aa, synthetic construct
NAKRGDFQNT

SEQ ID NO: 145521 - protein, 10 aa, synthetic construct
NALRGDFQNT

SEQ ID NO: 145522 - protein, 10 aa, synthetic construct
NAMRGDFQNT

SEQ ID NO: 145523 - protein, 10 aa, synthetic construct
NAPRGDFQNT

SEQ ID NO: 145524 - protein, 10 aa, synthetic construct
NARRGDFQNT

SEQ ID NO: 145525 - protein, 10 aa, synthetic construct
NAVRGDFQNT

SEQ ID NO: 145526 - protein, 10 aa, synthetic construct
NAWRGDFQNT

SEQ ID NO: 145527 - protein, 10 aa, synthetic construct
NAYRGDFQNT

SEQ ID NO: 145528 - protein, 10 aa, synthetic construct
NDARGDFQNT

SEQ ID NO: 145529 - protein, 10 aa, synthetic construct
NDDRGDFQNT

SEQ ID NO: 145530 - protein, 10 aa, synthetic construct
NDERGDFQNT

SEQ ID NO: 145531 - protein, 10 aa, synthetic construct
NDNRGDFQNT

SEQ ID NO: 145532 - protein, 10 aa, synthetic construct
NDQRGDFQNT

SEQ ID NO: 145533 - protein, 10 aa, synthetic construct
NDSRGDFQNT

SEQ ID NO: 145534 - protein, 10 aa, synthetic construct
NDTRGDFQNT

SEQ ID NO: 145535 - protein, 10 aa, synthetic construct
NDFRGDFQNT

SEQ ID NO: 145536 - protein, 10 aa, synthetic construct
NDGRGDFQNT

SEQ ID NO: 145537 - protein, 10 aa, synthetic construct
NDHRGDFQNT

SEQ ID NO: 145538 - protein, 10 aa, synthetic construct
NDIRGDFQNT

SEQ ID NO: 145539 - protein, 10 aa, synthetic construct
NDKRGDFQNT

SEQ ID NO: 145540 - protein, 10 aa, synthetic construct
NDLRGDFQNT

SEQ ID NO: 145541 - protein, 10 aa, synthetic construct
NDMRGDFQNT

SEQ ID NO: 145542 - protein, 10 aa, synthetic construct
NDPRGDFQNT

SEQ ID NO: 145543 - protein, 10 aa, synthetic construct
NDRRGDFQNT

SEQ ID NO: 145544 - protein, 10 aa, synthetic construct
NDVRGDFQNT

SEQ ID NO: 145545 - protein, 10 aa, synthetic construct
NDWRGDFQNT

SEQ ID NO: 145546 - protein, 10 aa, synthetic construct
NDYRGDFQNT

SEQ ID NO: 145547 - protein, 10 aa, synthetic construct
NEARGDFQNT

SEQ ID NO: 145548 - protein, 10 aa, synthetic construct
NEDRGDFQNT

SEQ ID NO: 145549 - protein, 10 aa, synthetic construct
NEERGDFQNT

SEQ ID NO: 145550 - protein, 10 aa, synthetic construct
NENRGDFQNT

SEQ ID NO: 145551 - protein, 10 aa, synthetic construct
NEQRGDFQNT

SEQ ID NO: 145552 - protein, 10 aa, synthetic construct
NESRGDFQNT

SEQ ID NO: 145553 - protein, 10 aa, synthetic construct
NETRGDFQNT

SEQ ID NO: 145554 - protein, 10 aa, synthetic construct
NEFRGDFQNT

SEQ ID NO: 145555 - protein, 10 aa, synthetic construct
NEGRGDFQNT

SEQ ID NO: 145556 - protein, 10 aa, synthetic construct
NEHRGDFQNT

SEQ ID NO: 145557 - protein, 10 aa, synthetic construct
NEIRGDFQNT

SEQ ID NO: 145558 - protein, 10 aa, synthetic construct
NEKRGDFQNT

SEQ ID NO: 145559 - protein, 10 aa, synthetic construct
NELRGDFQNT

SEQ ID NO: 145560 - protein, 10 aa, synthetic construct
NEMRGDFQNT

SEQ ID NO: 145561 - protein, 10 aa, synthetic construct
NEPRGDFQNT

SEQ ID NO: 145562 - protein, 10 aa, synthetic construct
NERRGDFQNT

SEQ ID NO: 145563 - protein, 10 aa, synthetic construct
NEVRGDFQNT

SEQ ID NO: 145564 - protein, 10 aa, synthetic construct
NEWRGDFQNT

SEQ ID NO: 145565 - protein, 10 aa, synthetic construct
NEYRGDFQNT

SEQ ID NO: 145566 - protein, 10 aa, synthetic construct
NNARGDFQNT

SEQ ID NO: 145567 - protein, 10 aa, synthetic construct
NNDRGDFQNT

SEQ ID NO: 145568 - protein, 10 aa, synthetic construct
NNERGDFQNT

SEQ ID NO: 145569 - protein, 10 aa, synthetic construct
NNNRGDFQNT

SEQ ID NO: 145570 - protein, 10 aa, synthetic construct
NNQRGDFQNT

SEQ ID NO: 145571 - protein, 10 aa, synthetic construct
NNSRGDFQNT

SEQ ID NO: 145572 - protein, 10 aa, synthetic construct
NNTRGDFQNT

SEQ ID NO: 145573 - protein, 10 aa, synthetic construct
NNFRGDFQNT

SEQ ID NO: 145574 - protein, 10 aa, synthetic construct
NNGRGDFQNT

SEQ ID NO: 145575 - protein, 10 aa, synthetic construct
NNHRGDFQNT

SEQ ID NO: 145576 - protein, 10 aa, synthetic construct
NNIRGDFQNT

SEQ ID NO: 145577 - protein, 10 aa, synthetic construct
NNKRGDFQNT

SEQ ID NO: 145578 - protein, 10 aa, synthetic construct
NNLRGDFQNT

SEQ ID NO: 145579 - protein, 10 aa, synthetic construct
NNMRGDFQNT

SEQ ID NO: 145580 - protein, 10 aa, synthetic construct
NNPRGDFQNT

SEQ ID NO: 145581 - protein, 10 aa, synthetic construct
NNRRGDFQNT

SEQ ID NO: 145582 - protein, 10 aa, synthetic construct
NNVRGDFQNT

SEQ ID NO: 145583 - protein, 10 aa, synthetic construct
NNWRGDFQNT

SEQ ID NO: 145584 - protein, 10 aa, synthetic construct
NNYRGDFQNT

SEQ ID NO: 145585 - protein, 10 aa, synthetic construct
NQARGDFQNT

SEQ ID NO: 145586 - protein, 10 aa, synthetic construct
NQDRGDFQNT

SEQ ID NO: 145587 - protein, 10 aa, synthetic construct
NQERGDFQNT

SEQ ID NO: 145588 - protein, 10 aa, synthetic construct
NQNRGDFQNT

SEQ ID NO: 145589 - protein, 10 aa, synthetic construct
NQQRGDFQNT

SEQ ID NO: 145590 - protein, 10 aa, synthetic construct
NQSRGDFQNT

SEQ ID NO: 145591 - protein, 10 aa, synthetic construct
NQTRGDFQNT

SEQ ID NO: 145592 - protein, 10 aa, synthetic construct
NQFRGDFQNT

SEQ ID NO: 145593 - protein, 10 aa, synthetic construct
NQGRGDFQNT

SEQ ID NO: 145594 - protein, 10 aa, synthetic construct
NQHRGDFQNT

SEQ ID NO: 145595 - protein, 10 aa, synthetic construct
NQIRGDFQNT

SEQ ID NO: 145596 - protein, 10 aa, synthetic construct
NQKRGDFQNT

SEQ ID NO: 145597 - protein, 10 aa, synthetic construct
NQLRGDFQNT

SEQ ID NO: 145598 - protein, 10 aa, synthetic construct
NQMRGDFQNT

SEQ ID NO: 145599 - protein, 10 aa, synthetic construct
NQPRGDFQNT

SEQ ID NO: 145600 - protein, 10 aa, synthetic construct
NQRRGDFQNT

SEQ ID NO: 145601 - protein, 10 aa, synthetic construct
NQVRGDFQNT

SEQ ID NO: 145602 - protein, 10 aa, synthetic construct
NQWRGDFQNT

SEQ ID NO: 145603 - protein, 10 aa, synthetic construct
NQYRGDFQNT

SEQ ID NO: 145604 - protein, 10 aa, synthetic construct
NSARGDFQNT

SEQ ID NO: 145605 - protein, 10 aa, synthetic construct
NSDRGDFQNT

SEQ ID NO: 145606 - protein, 10 aa, synthetic construct
NSERGDFQNT

SEQ ID NO: 145607 - protein, 10 aa, synthetic construct
NSNRGDFQNT

SEQ ID NO: 145608 - protein, 10 aa, synthetic construct
NSQRGDFQNT

SEQ ID NO: 145609 - protein, 10 aa, synthetic construct
NSSRGDFQNT

SEQ ID NO: 145610 - protein, 10 aa, synthetic construct
NSTRGDFQNT

SEQ ID NO: 145611 - protein, 10 aa, synthetic construct
NSFRGDFQNT

SEQ ID NO: 145612 - protein, 10 aa, synthetic construct
NSGRGDFQNT

SEQ ID NO: 145613 - protein, 10 aa, synthetic construct
NSHRGDFQNT

SEQ ID NO: 145614 - protein, 10 aa, synthetic construct
NSIRGDFQNT

SEQ ID NO: 145615 - protein, 10 aa, synthetic construct
NSKRGDFQNT

SEQ ID NO: 145616 - protein, 10 aa, synthetic construct
NSLRGDFQNT

SEQ ID NO: 145617 - protein, 10 aa, synthetic construct
NSMRGDFQNT

SEQ ID NO: 145618 - protein, 10 aa, synthetic construct
NSPRGDFQNT

SEQ ID NO: 145619 - protein, 10 aa, synthetic construct
NSRRGDFQNT

SEQ ID NO: 145620 - protein, 10 aa, synthetic construct
NSVRGDFQNT

SEQ ID NO: 145621 - protein, 10 aa, synthetic construct
NSWRGDFQNT

SEQ ID NO: 145622 - protein, 10 aa, synthetic construct
NSYRGDFQNT

SEQ ID NO: 145623 - protein, 10 aa, synthetic construct
NTARGDFQNT

SEQ ID NO: 145624 - protein, 10 aa, synthetic construct
NTDRGDFQNT

SEQ ID NO: 145625 - protein, 10 aa, synthetic construct
NTERGDFQNT

SEQ ID NO: 145626 - protein, 10 aa, synthetic construct
NTNRGDFQNT

SEQ ID NO: 145627 - protein, 10 aa, synthetic construct
NTQRGDFQNT

SEQ ID NO: 145628 - protein, 10 aa, synthetic construct
NTSRGDFQNT

SEQ ID NO: 145629 - protein, 10 aa, synthetic construct
NTTRGDFQNT

SEQ ID NO: 145630 - protein, 10 aa, synthetic construct
NTFRGDFQNT

SEQ ID NO: 145631 - protein, 10 aa, synthetic construct
NTGRGDFQNT

SEQ ID NO: 145632 - protein, 10 aa, synthetic construct
NTHRGDFQNT

SEQ ID NO: 145633 - protein, 10 aa, synthetic construct
NTIRGDFQNT

SEQ ID NO: 145634 - protein, 10 aa, synthetic construct
NTKRGDFQNT

SEQ ID NO: 145635 - protein, 10 aa, synthetic construct
NTLRGDFQNT

SEQ ID NO: 145636 - protein, 10 aa, synthetic construct
NTMRGDFQNT

SEQ ID NO: 145637 - protein, 10 aa, synthetic construct
NTPRGDFQNT

SEQ ID NO: 145638 - protein, 10 aa, synthetic construct
NTRRGDFQNT

SEQ ID NO: 145639 - protein, 10 aa, synthetic construct
NTVRGDFQNT

SEQ ID NO: 145640 - protein, 10 aa, synthetic construct
NTWRGDFQNT

SEQ ID NO: 145641 - protein, 10 aa, synthetic construct
NTYRGDFQNT

SEQ ID NO: 145642 - protein, 10 aa, synthetic construct
NFARGDFQNT

SEQ ID NO: 145643 - protein, 10 aa, synthetic construct
NFDRGDFQNT

SEQ ID NO: 145644 - protein, 10 aa, synthetic construct
NFERGDFQNT

SEQ ID NO: 145645 - protein, 10 aa, synthetic construct
NFNRGDFQNT

SEQ ID NO: 145646 - protein, 10 aa, synthetic construct
NFQRGDFQNT

SEQ ID NO: 145647 - protein, 10 aa, synthetic construct
NFSRGDFQNT

SEQ ID NO: 145648 - protein, 10 aa, synthetic construct
NFTRGDFQNT

SEQ ID NO: 145649 - protein, 10 aa, synthetic construct
NFFRGDFQNT

SEQ ID NO: 145650 - protein, 10 aa, synthetic construct
NFGRGDFQNT

SEQ ID NO: 145651 - protein, 10 aa, synthetic construct
NFHRGDFQNT

SEQ ID NO: 145652 - protein, 10 aa, synthetic construct
NFIRGDFQNT

SEQ ID NO: 145653 - protein, 10 aa, synthetic construct
NFKRGDFQNT

SEQ ID NO: 145654 - protein, 10 aa, synthetic construct
NFLRGDFQNT

SEQ ID NO: 145655 - protein, 10 aa, synthetic construct
NFMRGDFQNT

SEQ ID NO: 145656 - protein, 10 aa, synthetic construct
NFPRGDFQNT

SEQ ID NO: 145657 - protein, 10 aa, synthetic construct
NFRRGDFQNT

SEQ ID NO: 145658 - protein, 10 aa, synthetic construct
NFVRGDFQNT

SEQ ID NO: 145659 - protein, 10 aa, synthetic construct
NFWRGDFQNT

SEQ ID NO: 145660 - protein, 10 aa, synthetic construct
NFYRGDFQNT

SEQ ID NO: 145661 - protein, 10 aa, synthetic construct
NGARGDFQNT

SEQ ID NO: 145662 - protein, 10 aa, synthetic construct
NGDRGDFQNT

SEQ ID NO: 145663 - protein, 10 aa, synthetic construct
NGERGDFQNT

SEQ ID NO: 145664 - protein, 10 aa, synthetic construct
NGNRGDFQNT

SEQ ID NO: 145665 - protein, 10 aa, synthetic construct
NGQRGDFQNT

SEQ ID NO: 145666 - protein, 10 aa, synthetic construct
NGSRGDFQNT

SEQ ID NO: 145667 - protein, 10 aa, synthetic construct
NGTRGDFQNT

SEQ ID NO: 145668 - protein, 10 aa, synthetic construct
NGFRGDFQNT

SEQ ID NO: 145669 - protein, 10 aa, synthetic construct
NGGRGDFQNT

SEQ ID NO: 145670 - protein, 10 aa, synthetic construct
NGHRGDFQNT

SEQ ID NO: 145671 - protein, 10 aa, synthetic construct
NGIRGDFQNT

SEQ ID NO: 145672 - protein, 10 aa, synthetic construct
NGKRGDFQNT

SEQ ID NO: 145673 - protein, 10 aa, synthetic construct
NGLRGDFQNT

SEQ ID NO: 145674 - protein, 10 aa, synthetic construct
NGMRGDFQNT

SEQ ID NO: 145675 - protein, 10 aa, synthetic construct
NGPRGDFQNT

SEQ ID NO: 145676 - protein, 10 aa, synthetic construct
NGRRGDFQNT

SEQ ID NO: 145677 - protein, 10 aa, synthetic construct
NGVRGDFQNT

SEQ ID NO: 145678 - protein, 10 aa, synthetic construct
NGWRGDFQNT

SEQ ID NO: 145679 - protein, 10 aa, synthetic construct
NGYRGDFQNT

SEQ ID NO: 145680 - protein, 10 aa, synthetic construct
NHARGDFQNT

SEQ ID NO: 145681 - protein, 10 aa, synthetic construct
NHDRGDFQNT

SEQ ID NO: 145682 - protein, 10 aa, synthetic construct
NHERGDFQNT

SEQ ID NO: 145683 - protein, 10 aa, synthetic construct
NHNRGDFQNT

SEQ ID NO: 145684 - protein, 10 aa, synthetic construct
NHQRGDFQNT

SEQ ID NO: 145685 - protein, 10 aa, synthetic construct
NHSRGDFQNT

SEQ ID NO: 145686 - protein, 10 aa, synthetic construct
NHTRGDFQNT

SEQ ID NO: 145687 - protein, 10 aa, synthetic construct
NHFRGDFQNT

SEQ ID NO: 145688 - protein, 10 aa, synthetic construct
NHGRGDFQNT

SEQ ID NO: 145689 - protein, 10 aa, synthetic construct
NHHRGDFQNT

SEQ ID NO: 145690 - protein, 10 aa, synthetic construct
NHIRGDFQNT

SEQ ID NO: 145691 - protein, 10 aa, synthetic construct
NHKRGDFQNT

SEQ ID NO: 145692 - protein, 10 aa, synthetic construct
NHLRGDFQNT

SEQ ID NO: 145693 - protein, 10 aa, synthetic construct
NHMRGDFQNT

SEQ ID NO: 145694 - protein, 10 aa, synthetic construct
NHPRGDFQNT

SEQ ID NO: 145695 - protein, 10 aa, synthetic construct
NHRRGDFQNT

SEQ ID NO: 145696 - protein, 10 aa, synthetic construct
NHVRGDFQNT

SEQ ID NO: 145697 - protein, 10 aa, synthetic construct
NHWRGDFQNT

SEQ ID NO: 145698 - protein, 10 aa, synthetic construct
NHYRGDFQNT

SEQ ID NO: 145699 - protein, 10 aa, synthetic construct
NIARGDFQNT

SEQ ID NO: 145700 - protein, 10 aa, synthetic construct
NIDRGDFQNT

SEQ ID NO: 145701 - protein, 10 aa, synthetic construct
NIERGDFQNT

SEQ ID NO: 145702 - protein, 10 aa, synthetic construct
NINRGDFQNT

SEQ ID NO: 145703 - protein, 10 aa, synthetic construct
NIQRGDFQNT

SEQ ID NO: 145704 - protein, 10 aa, synthetic construct
NISRGDFQNT

SEQ ID NO: 145705 - protein, 10 aa, synthetic construct
NITRGDFQNT

SEQ ID NO: 145706 - protein, 10 aa, synthetic construct
NIFRGDFQNT

SEQ ID NO: 145707 - protein, 10 aa, synthetic construct
NIGRGDFQNT

SEQ ID NO: 145708 - protein, 10 aa, synthetic construct
NIHRGDFQNT

SEQ ID NO: 145709 - protein, 10 aa, synthetic construct
NIIRGDFQNT

SEQ ID NO: 145710 - protein, 10 aa, synthetic construct
NIKRGDFQNT

SEQ ID NO: 145711 - protein, 10 aa, synthetic construct
NILRGDFQNT

SEQ ID NO: 145712 - protein, 10 aa, synthetic construct
NIMRGDFQNT

SEQ ID NO: 145713 - protein, 10 aa, synthetic construct
NIPRGDFQNT

SEQ ID NO: 145714 - protein, 10 aa, synthetic construct
NIRRGDFQNT

SEQ ID NO: 145715 - protein, 10 aa, synthetic construct
NIVRGDFQNT

SEQ ID NO: 145716 - protein, 10 aa, synthetic construct
NIWRGDFQNT

SEQ ID NO: 145717 - protein, 10 aa, synthetic construct
NIYRGDFQNT

SEQ ID NO: 145718 - protein, 10 aa, synthetic construct
NKARGDFQNT

SEQ ID NO: 145719 - protein, 10 aa, synthetic construct
NKDRGDFQNT

SEQ ID NO: 145720 - protein, 10 aa, synthetic construct
NKERGDFQNT

SEQ ID NO: 145721 - protein, 10 aa, synthetic construct
NKNRGDFQNT

SEQ ID NO: 145722 - protein, 10 aa, synthetic construct
NKQRGDFQNT

SEQ ID NO: 145723 - protein, 10 aa, synthetic construct
NKSRGDFQNT

SEQ ID NO: 145724 - protein, 10 aa, synthetic construct
NKTRGDFQNT

SEQ ID NO: 145725 - protein, 10 aa, synthetic construct
NKFRGDFQNT

SEQ ID NO: 145726 - protein, 10 aa, synthetic construct
NKGRGDFQNT

SEQ ID NO: 145727 - protein, 10 aa, synthetic construct
NKHRGDFQNT

SEQ ID NO: 145728 - protein, 10 aa, synthetic construct
NKIRGDFQNT

SEQ ID NO: 145729 - protein, 10 aa, synthetic construct
NKKRGDFQNT

SEQ ID NO: 145730 - protein, 10 aa, synthetic construct
NKLRGDFQNT

SEQ ID NO: 145731 - protein, 10 aa, synthetic construct
NKMRGDFQNT

SEQ ID NO: 145732 - protein, 10 aa, synthetic construct
NKPRGDFQNT

SEQ ID NO: 145733 - protein, 10 aa, synthetic construct
NKRRGDFQNT

SEQ ID NO: 145734 - protein, 10 aa, synthetic construct
NKVRGDFQNT

SEQ ID NO: 145735 - protein, 10 aa, synthetic construct
NKWRGDFQNT

SEQ ID NO: 145736 - protein, 10 aa, synthetic construct
NKYRGDFQNT

SEQ ID NO: 145737 - protein, 10 aa, synthetic construct
NLARGDFQNT

SEQ ID NO: 145738 - protein, 10 aa, synthetic construct
NLDRGDFQNT

SEQ ID NO: 145739 - protein, 10 aa, synthetic construct
NLERGDFQNT

SEQ ID NO: 145740 - protein, 10 aa, synthetic construct
NLNRGDFQNT

SEQ ID NO: 145741 - protein, 10 aa, synthetic construct
NLQRGDFQNT

SEQ ID NO: 145742 - protein, 10 aa, synthetic construct
NLSRGDFQNT

SEQ ID NO: 145743 - protein, 10 aa, synthetic construct
NLTRGDFQNT

SEQ ID NO: 145744 - protein, 10 aa, synthetic construct
NLFRGDFQNT

SEQ ID NO: 145745 - protein, 10 aa, synthetic construct
NLGRGDFQNT

SEQ ID NO: 145746 - protein, 10 aa, synthetic construct
NLHRGDFQNT

SEQ ID NO: 145747 - protein, 10 aa, synthetic construct
NLIRGDFQNT

SEQ ID NO: 145748 - protein, 10 aa, synthetic construct
NLKRGDFQNT

SEQ ID NO: 145749 - protein, 10 aa, synthetic construct
NLLRGDFQNT

SEQ ID NO: 145750 - protein, 10 aa, synthetic construct
NLMRGDFQNT

SEQ ID NO: 145751 - protein, 10 aa, synthetic construct
NLPRGDFQNT

SEQ ID NO: 145752 - protein, 10 aa, synthetic construct
NLRRGDFQNT

SEQ ID NO: 145753 - protein, 10 aa, synthetic construct
NLVRGDFQNT

SEQ ID NO: 145754 - protein, 10 aa, synthetic construct
NLWRGDFQNT

SEQ ID NO: 145755 - protein, 10 aa, synthetic construct
NLYRGDFQNT

SEQ ID NO: 145756 - protein, 10 aa, synthetic construct
NMARGDFQNT

SEQ ID NO: 145757 - protein, 10 aa, synthetic construct
NMDRGDFQNT

SEQ ID NO: 145758 - protein, 10 aa, synthetic construct
NMERGDFQNT

SEQ ID NO: 145759 - protein, 10 aa, synthetic construct
NMNRGDFQNT

SEQ ID NO: 145760 - protein, 10 aa, synthetic construct
NMQRGDFQNT

SEQ ID NO: 145761 - protein, 10 aa, synthetic construct
NMSRGDFQNT

SEQ ID NO: 145762 - protein, 10 aa, synthetic construct
NMTRGDFQNT

SEQ ID NO: 145763 - protein, 10 aa, synthetic construct
NMFRGDFQNT

SEQ ID NO: 145764 - protein, 10 aa, synthetic construct
NMGRGDFQNT

SEQ ID NO: 145765 - protein, 10 aa, synthetic construct
NMHRGDFQNT

SEQ ID NO: 145766 - protein, 10 aa, synthetic construct
NMIRGDFQNT

SEQ ID NO: 145767 - protein, 10 aa, synthetic construct
NMKRGDFQNT

SEQ ID NO: 145768 - protein, 10 aa, synthetic construct
NMLRGDFQNT

SEQ ID NO: 145769 - protein, 10 aa, synthetic construct
NMMRGDFQNT

SEQ ID NO: 145770 - protein, 10 aa, synthetic construct
NMPRGDFQNT

SEQ ID NO: 145771 - protein, 10 aa, synthetic construct
NMRRGDFQNT

SEQ ID NO: 145772 - protein, 10 aa, synthetic construct
NMVRGDFQNT

SEQ ID NO: 145773 - protein, 10 aa, synthetic construct
NMWRGDFQNT

SEQ ID NO: 145774 - protein, 10 aa, synthetic construct
NMYRGDFQNT

SEQ ID NO: 145775 - protein, 10 aa, synthetic construct
NPARGDFQNT

SEQ ID NO: 145776 - protein, 10 aa, synthetic construct
NPDRGDFQNT

SEQ ID NO: 145777 - protein, 10 aa, synthetic construct
NPERGDFQNT

SEQ ID NO: 145778 - protein, 10 aa, synthetic construct
NPNRGDFQNT

SEQ ID NO: 145779 - protein, 10 aa, synthetic construct
NPQRGDFQNT

SEQ ID NO: 145780 - protein, 10 aa, synthetic construct
NPSRGDFQNT

SEQ ID NO: 145781 - protein, 10 aa, synthetic construct
NPTRGDFQNT

SEQ ID NO: 145782 - protein, 10 aa, synthetic construct
NPFRGDFQNT

SEQ ID NO: 145783 - protein, 10 aa, synthetic construct
NPGRGDFQNT

SEQ ID NO: 145784 - protein, 10 aa, synthetic construct
NPHRGDFQNT

SEQ ID NO: 145785 - protein, 10 aa, synthetic construct
NPIRGDFQNT

SEQ ID NO: 145786 - protein, 10 aa, synthetic construct
NPKRGDFQNT

SEQ ID NO: 145787 - protein, 10 aa, synthetic construct
NPLRGDFQNT

SEQ ID NO: 145788 - protein, 10 aa, synthetic construct
NPMRGDFQNT

SEQ ID NO: 145789 - protein, 10 aa, synthetic construct
NPPRGDFQNT

SEQ ID NO: 145790 - protein, 10 aa, synthetic construct
NPRRGDFQNT

SEQ ID NO: 145791 - protein, 10 aa, synthetic construct
NPVRGDFQNT

SEQ ID NO: 145792 - protein, 10 aa, synthetic construct
NPWRGDFQNT

SEQ ID NO: 145793 - protein, 10 aa, synthetic construct
NPYRGDFQNT

SEQ ID NO: 145794 - protein, 10 aa, synthetic construct
NRARGDFQNT

SEQ ID NO: 145795 - protein, 10 aa, synthetic construct
NRDRGDFQNT

SEQ ID NO: 145796 - protein, 10 aa, synthetic construct
NRERGDFQNT

SEQ ID NO: 145797 - protein, 10 aa, synthetic construct
NRNRGDFQNT

SEQ ID NO: 145798 - protein, 10 aa, synthetic construct
NRQRGDFQNT

SEQ ID NO: 145799 - protein, 10 aa, synthetic construct
NRSRGDFQNT

SEQ ID NO: 145800 - protein, 10 aa, synthetic construct
NRTRGDFQNT

SEQ ID NO: 145801 - protein, 10 aa, synthetic construct
NRFRGDFQNT

SEQ ID NO: 145802 - protein, 10 aa, synthetic construct
NRGRGDFQNT

SEQ ID NO: 145803 - protein, 10 aa, synthetic construct
NRHRGDFQNT

SEQ ID NO: 145804 - protein, 10 aa, synthetic construct
NRIRGDFQNT

SEQ ID NO: 145805 - protein, 10 aa, synthetic construct
NRKRGDFQNT

SEQ ID NO: 145806 - protein, 10 aa, synthetic construct
NRLRGDFQNT

SEQ ID NO: 145807 - protein, 10 aa, synthetic construct
NRMRGDFQNT

SEQ ID NO: 145808 - protein, 10 aa, synthetic construct
NRPRGDFQNT

SEQ ID NO: 145809 - protein, 10 aa, synthetic construct
NRRRGDFQNT

SEQ ID NO: 145810 - protein, 10 aa, synthetic construct
NRVRGDFQNT

SEQ ID NO: 145811 - protein, 10 aa, synthetic construct
NRWRGDFQNT

SEQ ID NO: 145812 - protein, 10 aa, synthetic construct
NRYRGDFQNT

SEQ ID NO: 145813 - protein, 10 aa, synthetic construct
NVARGDFQNT

SEQ ID NO: 145814 - protein, 10 aa, synthetic construct
NVDRGDFQNT

SEQ ID NO: 145815 - protein, 10 aa, synthetic construct
NVERGDFQNT

SEQ ID NO: 145816 - protein, 10 aa, synthetic construct
NVNRGDFQNT

SEQ ID NO: 145817 - protein, 10 aa, synthetic construct
NVQRGDFQNT

SEQ ID NO: 145818 - protein, 10 aa, synthetic construct
NVSRGDFQNT

SEQ ID NO: 145819 - protein, 10 aa, synthetic construct
NVTRGDFQNT

SEQ ID NO: 145820 - protein, 10 aa, synthetic construct
NVFRGDFQNT

SEQ ID NO: 145821 - protein, 10 aa, synthetic construct
NVGRGDFQNT

SEQ ID NO: 145822 - protein, 10 aa, synthetic construct
NVHRGDFQNT

SEQ ID NO: 145823 - protein, 10 aa, synthetic construct
NVIRGDFQNT

SEQ ID NO: 145824 - protein, 10 aa, synthetic construct
NVKRGDFQNT

SEQ ID NO: 145825 - protein, 10 aa, synthetic construct
NVLRGDFQNT

SEQ ID NO: 145826 - protein, 10 aa, synthetic construct
NVMRGDFQNT

SEQ ID NO: 145827 - protein, 10 aa, synthetic construct
NVPRGDFQNT

SEQ ID NO: 145828 - protein, 10 aa, synthetic construct
NVRRGDFQNT

SEQ ID NO: 145829 - protein, 10 aa, synthetic construct
NVVRGDFQNT

SEQ ID NO: 145830 - protein, 10 aa, synthetic construct
NVWRGDFQNT

SEQ ID NO: 145831 - protein, 10 aa, synthetic construct
NVYRGDFQNT

SEQ ID NO: 145832 - protein, 10 aa, synthetic construct
NWARGDFQNT

SEQ ID NO: 145833 - protein, 10 aa, synthetic construct
NWDRGDFQNT

SEQ ID NO: 145834 - protein, 10 aa, synthetic construct
NWERGDFQNT

SEQ ID NO: 145835 - protein, 10 aa, synthetic construct
NWNRGDFQNT

SEQ ID NO: 145836 - protein, 10 aa, synthetic construct
NWQRGDFQNT

SEQ ID NO: 145837 - protein, 10 aa, synthetic construct
NWSRGDFQNT

SEQ ID NO: 145838 - protein, 10 aa, synthetic construct
NWTRGDFQNT

SEQ ID NO: 145839 - protein, 10 aa, synthetic construct
NWFRGDFQNT

SEQ ID NO: 145840 - protein, 10 aa, synthetic construct
NWGRGDFQNT

SEQ ID NO: 145841 - protein, 10 aa, synthetic construct
NWHRGDFQNT

SEQ ID NO: 145842 - protein, 10 aa, synthetic construct
NWIRGDFQNT

SEQ ID NO: 145843 - protein, 10 aa, synthetic construct
NWKRGDFQNT

SEQ ID NO: 145844 - protein, 10 aa, synthetic construct
NWLRGDFQNT

SEQ ID NO: 145845 - protein, 10 aa, synthetic construct
NWMRGDFQNT

SEQ ID NO: 145846 - protein, 10 aa, synthetic construct
NWPRGDFQNT

SEQ ID NO: 145847 - protein, 10 aa, synthetic construct
NWRRGDFQNT

SEQ ID NO: 145848 - protein, 10 aa, synthetic construct
NWVRGDFQNT

SEQ ID NO: 145849 - protein, 10 aa, synthetic construct
NWWRGDFQNT

SEQ ID NO: 145850 - protein, 10 aa, synthetic construct
NWYRGDFQNT

SEQ ID NO: 145851 - protein, 10 aa, synthetic construct
NYARGDFQNT

SEQ ID NO: 145852 - protein, 10 aa, synthetic construct
NYDRGDFQNT

SEQ ID NO: 145853 - protein, 10 aa, synthetic construct
NYERGDFQNT

SEQ ID NO: 145854 - protein, 10 aa, synthetic construct
NYNRGDFQNT

SEQ ID NO: 145855 - protein, 10 aa, synthetic construct
NYQRGDFQNT

SEQ ID NO: 145856 - protein, 10 aa, synthetic construct
NYSRGDFQNT

SEQ ID NO: 145857 - protein, 10 aa, synthetic construct
NYTRGDFQNT

SEQ ID NO: 145858 - protein, 10 aa, synthetic construct
NYFRGDFQNT

SEQ ID NO: 145859 - protein, 10 aa, synthetic construct
NYGRGDFQNT

SEQ ID NO: 145860 - protein, 10 aa, synthetic construct
NYHRGDFQNT

SEQ ID NO: 145861 - protein, 10 aa, synthetic construct
NYIRGDFQNT

SEQ ID NO: 145862 - protein, 10 aa, synthetic construct
NYKRGDFQNT

SEQ ID NO: 145863 - protein, 10 aa, synthetic construct
NYLRGDFQNT

SEQ ID NO: 145864 - protein, 10 aa, synthetic construct
NYMRGDFQNT

SEQ ID NO: 145865 - protein, 10 aa, synthetic construct
NYPRGDFQNT

SEQ ID NO: 145866 - protein, 10 aa, synthetic construct
NYRRGDFQNT

SEQ ID NO: 145867 - protein, 10 aa, synthetic construct
NYVRGDFQNT

SEQ ID NO: 145868 - protein, 10 aa, synthetic construct
NYWRGDFQNT

SEQ ID NO: 145869 - protein, 10 aa, synthetic construct
NYYRGDFQNT

SEQ ID NO: 145870 - protein, 10 aa, synthetic construct
QAARGDFQNT

SEQ ID NO: 145871 - protein, 10 aa, synthetic construct
QADRGDFQNT

SEQ ID NO: 145872 - protein, 10 aa, synthetic construct
QAERGDFQNT

SEQ ID NO: 145873 - protein, 10 aa, synthetic construct
QANRGDFQNT

SEQ ID NO: 145874 - protein, 10 aa, synthetic construct
QAQRGDFQNT

SEQ ID NO: 145875 - protein, 10 aa, synthetic construct
QASRGDFQNT

SEQ ID NO: 145876 - protein, 10 aa, synthetic construct
QATRGDFQNT

SEQ ID NO: 145877 - protein, 10 aa, synthetic construct
QAFRGDFQNT

SEQ ID NO: 145878 - protein, 10 aa, synthetic construct
QAGRGDFQNT

SEQ ID NO: 145879 - protein, 10 aa, synthetic construct
QAHRGDFQNT

SEQ ID NO: 145880 - protein, 10 aa, synthetic construct
QAIRGDFQNT

SEQ ID NO: 145881 - protein, 10 aa, synthetic construct
QAKRGDFQNT

SEQ ID NO: 145882 - protein, 10 aa, synthetic construct
QALRGDFQNT

SEQ ID NO: 145883 - protein, 10 aa, synthetic construct
QAMRGDFQNT

SEQ ID NO: 145884 - protein, 10 aa, synthetic construct
QAPRGDFQNT

SEQ ID NO: 145885 - protein, 10 aa, synthetic construct
QARRGDFQNT

SEQ ID NO: 145886 - protein, 10 aa, synthetic construct
QAVRGDFQNT

SEQ ID NO: 145887 - protein, 10 aa, synthetic construct
QAWRGDFQNT

SEQ ID NO: 145888 - protein, 10 aa, synthetic construct
QAYRGDFQNT

SEQ ID NO: 145889 - protein, 10 aa, synthetic construct
QDARGDFQNT

SEQ ID NO: 145890 - protein, 10 aa, synthetic construct
QDDRGDFQNT

SEQ ID NO: 145891 - protein, 10 aa, synthetic construct
QDERGDFQNT

SEQ ID NO: 145892 - protein, 10 aa, synthetic construct
QDNRGDFQNT

SEQ ID NO: 145893 - protein, 10 aa, synthetic construct
QDQRGDFQNT

SEQ ID NO: 145894 - protein, 10 aa, synthetic construct
QDSRGDFQNT

SEQ ID NO: 145895 - protein, 10 aa, synthetic construct
QDTRGDFQNT

SEQ ID NO: 145896 - protein, 10 aa, synthetic construct
QDFRGDFQNT

SEQ ID NO: 145897 - protein, 10 aa, synthetic construct
QDGRGDFQNT

SEQ ID NO: 145898 - protein, 10 aa, synthetic construct
QDHRGDFQNT

SEQ ID NO: 145899 - protein, 10 aa, synthetic construct
QDIRGDFQNT

SEQ ID NO: 145900 - protein, 10 aa, synthetic construct
QDKRGDFQNT

SEQ ID NO: 145901 - protein, 10 aa, synthetic construct
QDLRGDFQNT

SEQ ID NO: 145902 - protein, 10 aa, synthetic construct
QDMRGDFQNT

SEQ ID NO: 145903 - protein, 10 aa, synthetic construct
QDPRGDFQNT

SEQ ID NO: 145904 - protein, 10 aa, synthetic construct
QDRRGDFQNT

SEQ ID NO: 145905 - protein, 10 aa, synthetic construct
QDVRGDFQNT

SEQ ID NO: 145906 - protein, 10 aa, synthetic construct
QDWRGDFQNT

SEQ ID NO: 145907 - protein, 10 aa, synthetic construct
QDYRGDFQNT

SEQ ID NO: 145908 - protein, 10 aa, synthetic construct
QEARGDFQNT

SEQ ID NO: 145909 - protein, 10 aa, synthetic construct
QEDRGDFQNT

SEQ ID NO: 145910 - protein, 10 aa, synthetic construct
QEERGDFQNT

SEQ ID NO: 145911 - protein, 10 aa, synthetic construct
QENRGDFQNT

SEQ ID NO: 145912 - protein, 10 aa, synthetic construct
QEQRGDFQNT

SEQ ID NO: 145913 - protein, 10 aa, synthetic construct
QESRGDFQNT

SEQ ID NO: 145914 - protein, 10 aa, synthetic construct
QETRGDFQNT

SEQ ID NO: 145915 - protein, 10 aa, synthetic construct
QEFRGDFQNT

SEQ ID NO: 145916 - protein, 10 aa, synthetic construct
QEGRGDFQNT

SEQ ID NO: 145917 - protein, 10 aa, synthetic construct
QEHRGDFQNT

SEQ ID NO: 145918 - protein, 10 aa, synthetic construct
QEIRGDFQNT

SEQ ID NO: 145919 - protein, 10 aa, synthetic construct
QEKRGDFQNT

SEQ ID NO: 145920 - protein, 10 aa, synthetic construct
QELRGDFQNT

SEQ ID NO: 145921 - protein, 10 aa, synthetic construct
QEMRGDFQNT

SEQ ID NO: 145922 - protein, 10 aa, synthetic construct
QEPRGDFQNT

SEQ ID NO: 145923 - protein, 10 aa, synthetic construct
QERRGDFQNT

SEQ ID NO: 145924 - protein, 10 aa, synthetic construct
QEVRGDFQNT

SEQ ID NO: 145925 - protein, 10 aa, synthetic construct
QEWRGDFQNT

SEQ ID NO: 145926 - protein, 10 aa, synthetic construct
QEYRGDFQNT

SEQ ID NO: 145927 - protein, 10 aa, synthetic construct
QNARGDFQNT

SEQ ID NO: 145928 - protein, 10 aa, synthetic construct
QNDRGDFQNT

SEQ ID NO: 145929 - protein, 10 aa, synthetic construct
QNERGDFQNT

SEQ ID NO: 145930 - protein, 10 aa, synthetic construct
QNNRGDFQNT

SEQ ID NO: 145931 - protein, 10 aa, synthetic construct
QNQRGDFQNT

SEQ ID NO: 145932 - protein, 10 aa, synthetic construct
QNSRGDFQNT

SEQ ID NO: 145933 - protein, 10 aa, synthetic construct
QNTRGDFQNT

SEQ ID NO: 145934 - protein, 10 aa, synthetic construct
QNFRGDFQNT

SEQ ID NO: 145935 - protein, 10 aa, synthetic construct
QNGRGDFQNT

SEQ ID NO: 145936 - protein, 10 aa, synthetic construct
QNHRGDFQNT

SEQ ID NO: 145937 - protein, 10 aa, synthetic construct
QNIRGDFQNT

SEQ ID NO: 145938 - protein, 10 aa, synthetic construct
QNKRGDFQNT

SEQ ID NO: 145939 - protein, 10 aa, synthetic construct
QNLRGDFQNT

SEQ ID NO: 145940 - protein, 10 aa, synthetic construct
QNMRGDFQNT

SEQ ID NO: 145941 - protein, 10 aa, synthetic construct
QNPRGDFQNT

SEQ ID NO: 145942 - protein, 10 aa, synthetic construct
QNRRGDFQNT

SEQ ID NO: 145943 - protein, 10 aa, synthetic construct
QNVRGDFQNT

SEQ ID NO: 145944 - protein, 10 aa, synthetic construct
QNWRGDFQNT

SEQ ID NO: 145945 - protein, 10 aa, synthetic construct
QNYRGDFQNT

SEQ ID NO: 145946 - protein, 10 aa, synthetic construct
QQARGDFQNT

SEQ ID NO: 145947 - protein, 10 aa, synthetic construct
QQDRGDFQNT

SEQ ID NO: 145948 - protein, 10 aa, synthetic construct
QQERGDFQNT

SEQ ID NO: 145949 - protein, 10 aa, synthetic construct
QQNRGDFQNT

SEQ ID NO: 145950 - protein, 10 aa, synthetic construct
QQQRGDFQNT

SEQ ID NO: 145951 - protein, 10 aa, synthetic construct
QQSRGDFQNT

SEQ ID NO: 145952 - protein, 10 aa, synthetic construct
QQTRGDFQNT

SEQ ID NO: 145953 - protein, 10 aa, synthetic construct
QQFRGDFQNT

SEQ ID NO: 145954 - protein, 10 aa, synthetic construct
QQGRGDFQNT

SEQ ID NO: 145955 - protein, 10 aa, synthetic construct
QQHRGDFQNT

SEQ ID NO: 145956 - protein, 10 aa, synthetic construct
QQIRGDFQNT

SEQ ID NO: 145957 - protein, 10 aa, synthetic construct
QQKRGDFQNT

SEQ ID NO: 145958 - protein, 10 aa, synthetic construct
QQLRGDFQNT

SEQ ID NO: 145959 - protein, 10 aa, synthetic construct
QQMRGDFQNT

SEQ ID NO: 145960 - protein, 10 aa, synthetic construct
QQPRGDFQNT

SEQ ID NO: 145961 - protein, 10 aa, synthetic construct
QQRRGDFQNT

SEQ ID NO: 145962 - protein, 10 aa, synthetic construct
QQVRGDFQNT

SEQ ID NO: 145963 - protein, 10 aa, synthetic construct
QQWRGDFQNT

SEQ ID NO: 145964 - protein, 10 aa, synthetic construct
QQYRGDFQNT

SEQ ID NO: 145965 - protein, 10 aa, synthetic construct
QSARGDFQNT

SEQ ID NO: 145966 - protein, 10 aa, synthetic construct
QSDRGDFQNT

SEQ ID NO: 145967 - protein, 10 aa, synthetic construct
QSERGDFQNT

SEQ ID NO: 145968 - protein, 10 aa, synthetic construct
QSNRGDFQNT

SEQ ID NO: 145969 - protein, 10 aa, synthetic construct
QSQRGDFQNT

SEQ ID NO: 145970 - protein, 10 aa, synthetic construct
QSSRGDFQNT

SEQ ID NO: 145971 - protein, 10 aa, synthetic construct
QSTRGDFQNT

SEQ ID NO: 145972 - protein, 10 aa, synthetic construct
QSFRGDFQNT

SEQ ID NO: 145973 - protein, 10 aa, synthetic construct
QSGRGDFQNT

SEQ ID NO: 145974 - protein, 10 aa, synthetic construct
QSHRGDFQNT

SEQ ID NO: 145975 - protein, 10 aa, synthetic construct
QSIRGDFQNT

SEQ ID NO: 145976 - protein, 10 aa, synthetic construct
QSKRGDFQNT

SEQ ID NO: 145977 - protein, 10 aa, synthetic construct
QSLRGDFQNT

SEQ ID NO: 145978 - protein, 10 aa, synthetic construct
QSMRGDFQNT

SEQ ID NO: 145979 - protein, 10 aa, synthetic construct
QSPRGDFQNT

SEQ ID NO: 145980 - protein, 10 aa, synthetic construct
QSRRGDFQNT

SEQ ID NO: 145981 - protein, 10 aa, synthetic construct
QSVRGDFQNT

SEQ ID NO: 145982 - protein, 10 aa, synthetic construct
QSWRGDFQNT

SEQ ID NO: 145983 - protein, 10 aa, synthetic construct
QSYRGDFQNT

SEQ ID NO: 145984 - protein, 10 aa, synthetic construct
QTARGDFQNT

SEQ ID NO: 145985 - protein, 10 aa, synthetic construct
QTDRGDFQNT

SEQ ID NO: 145986 - protein, 10 aa, synthetic construct
QTERGDFQNT

SEQ ID NO: 145987 - protein, 10 aa, synthetic construct
QTNRGDFQNT

SEQ ID NO: 145988 - protein, 10 aa, synthetic construct
QTQRGDFQNT

SEQ ID NO: 145989 - protein, 10 aa, synthetic construct
QTSRGDFQNT

SEQ ID NO: 145990 - protein, 10 aa, synthetic construct
QTTRGDFQNT

SEQ ID NO: 145991 - protein, 10 aa, synthetic construct
QTFRGDFQNT

SEQ ID NO: 145992 - protein, 10 aa, synthetic construct
QTGRGDFQNT

SEQ ID NO: 145993 - protein, 10 aa, synthetic construct
QTHRGDFQNT

SEQ ID NO: 145994 - protein, 10 aa, synthetic construct
QTIRGDFQNT

SEQ ID NO: 145995 - protein, 10 aa, synthetic construct
QTKRGDFQNT

SEQ ID NO: 145996 - protein, 10 aa, synthetic construct
QTLRGDFQNT

SEQ ID NO: 145997 - protein, 10 aa, synthetic construct
QTMRGDFQNT

SEQ ID NO: 145998 - protein, 10 aa, synthetic construct
QTPRGDFQNT

SEQ ID NO: 145999 - protein, 10 aa, synthetic construct
QTRRGDFQNT

SEQ ID NO: 146000 - protein, 10 aa, synthetic construct
QTVRGDFQNT

SEQ ID NO: 146001 - protein, 10 aa, synthetic construct
QTWRGDFQNT

SEQ ID NO: 146002 - protein, 10 aa, synthetic construct
QTYRGDFQNT

SEQ ID NO: 146003 - protein, 10 aa, synthetic construct
QFARGDFQNT

SEQ ID NO: 146004 - protein, 10 aa, synthetic construct
QFDRGDFQNT

SEQ ID NO: 146005 - protein, 10 aa, synthetic construct
QFERGDFQNT

SEQ ID NO: 146006 - protein, 10 aa, synthetic construct
QFNRGDFQNT

SEQ ID NO: 146007 - protein, 10 aa, synthetic construct
QFQRGDFQNT

SEQ ID NO: 146008 - protein, 10 aa, synthetic construct
QFSRGDFQNT

SEQ ID NO: 146009 - protein, 10 aa, synthetic construct
QFTRGDFQNT

SEQ ID NO: 146010 - protein, 10 aa, synthetic construct
QFFRGDFQNT

SEQ ID NO: 146011 - protein, 10 aa, synthetic construct
QFGRGDFQNT

SEQ ID NO: 146012 - protein, 10 aa, synthetic construct
QFHRGDFQNT

SEQ ID NO: 146013 - protein, 10 aa, synthetic construct
QFIRGDFQNT

SEQ ID NO: 146014 - protein, 10 aa, synthetic construct
QFKRGDFQNT

SEQ ID NO: 146015 - protein, 10 aa, synthetic construct
QFLRGDFQNT

SEQ ID NO: 146016 - protein, 10 aa, synthetic construct
QFMRGDFQNT

SEQ ID NO: 146017 - protein, 10 aa, synthetic construct
QFPRGDFQNT

SEQ ID NO: 146018 - protein, 10 aa, synthetic construct
QFRRGDFQNT

SEQ ID NO: 146019 - protein, 10 aa, synthetic construct
QFVRGDFQNT

SEQ ID NO: 146020 - protein, 10 aa, synthetic construct
QFWRGDFQNT

SEQ ID NO: 146021 - protein, 10 aa, synthetic construct
QFYRGDFQNT

SEQ ID NO: 146022 - protein, 10 aa, synthetic construct
QGARGDFQNT

SEQ ID NO: 146023 - protein, 10 aa, synthetic construct
QGDRGDFQNT

SEQ ID NO: 146024 - protein, 10 aa, synthetic construct
QGERGDFQNT

SEQ ID NO: 146025 - protein, 10 aa, synthetic construct
QGNRGDFQNT

SEQ ID NO: 146026 - protein, 10 aa, synthetic construct
QGQRGDFQNT

SEQ ID NO: 146027 - protein, 10 aa, synthetic construct
QGSRGDFQNT

SEQ ID NO: 146028 - protein, 10 aa, synthetic construct
QGTRGDFQNT

SEQ ID NO: 146029 - protein, 10 aa, synthetic construct
QGFRGDFQNT

SEQ ID NO: 146030 - protein, 10 aa, synthetic construct
QGGRGDFQNT

SEQ ID NO: 146031 - protein, 10 aa, synthetic construct
QGHRGDFQNT

SEQ ID NO: 146032 - protein, 10 aa, synthetic construct
QGIRGDFQNT

SEQ ID NO: 146033 - protein, 10 aa, synthetic construct
QGKRGDFQNT

SEQ ID NO: 146034 - protein, 10 aa, synthetic construct
QGLRGDFQNT

SEQ ID NO: 146035 - protein, 10 aa, synthetic construct
QGMRGDFQNT

SEQ ID NO: 146036 - protein, 10 aa, synthetic construct
QGPRGDFQNT

SEQ ID NO: 146037 - protein, 10 aa, synthetic construct
QGRRGDFQNT

SEQ ID NO: 146038 - protein, 10 aa, synthetic construct
QGVRGDFQNT

SEQ ID NO: 146039 - protein, 10 aa, synthetic construct
QGWRGDFQNT

SEQ ID NO: 146040 - protein, 10 aa, synthetic construct
QGYRGDFQNT

SEQ ID NO: 146041 - protein, 10 aa, synthetic construct
QHARGDFQNT

SEQ ID NO: 146042 - protein, 10 aa, synthetic construct
QHDRGDFQNT

SEQ ID NO: 146043 - protein, 10 aa, synthetic construct
QHERGDFQNT

SEQ ID NO: 146044 - protein, 10 aa, synthetic construct
QHNRGDFQNT

SEQ ID NO: 146045 - protein, 10 aa, synthetic construct
QHQRGDFQNT

SEQ ID NO: 146046 - protein, 10 aa, synthetic construct
QHSRGDFQNT

SEQ ID NO: 146047 - protein, 10 aa, synthetic construct
QHTRGDFQNT

SEQ ID NO: 146048 - protein, 10 aa, synthetic construct
QHFRGDFQNT

SEQ ID NO: 146049 - protein, 10 aa, synthetic construct
QHGRGDFQNT

SEQ ID NO: 146050 - protein, 10 aa, synthetic construct
QHHRGDFQNT

SEQ ID NO: 146051 - protein, 10 aa, synthetic construct
QHIRGDFQNT

SEQ ID NO: 146052 - protein, 10 aa, synthetic construct
QHKRGDFQNT

SEQ ID NO: 146053 - protein, 10 aa, synthetic construct
QHLRGDFQNT

SEQ ID NO: 146054 - protein, 10 aa, synthetic construct
QHMRGDFQNT

SEQ ID NO: 146055 - protein, 10 aa, synthetic construct
QHPRGDFQNT

SEQ ID NO: 146056 - protein, 10 aa, synthetic construct
QHRRGDFQNT

SEQ ID NO: 146057 - protein, 10 aa, synthetic construct
QHVRGDFQNT

SEQ ID NO: 146058 - protein, 10 aa, synthetic construct
QHWRGDFQNT

SEQ ID NO: 146059 - protein, 10 aa, synthetic construct
QHYRGDFQNT

SEQ ID NO: 146060 - protein, 10 aa, synthetic construct
QIARGDFQNT

SEQ ID NO: 146061 - protein, 10 aa, synthetic construct
QIDRGDFQNT

SEQ ID NO: 146062 - protein, 10 aa, synthetic construct
QIERGDFQNT

SEQ ID NO: 146063 - protein, 10 aa, synthetic construct
QINRGDFQNT

SEQ ID NO: 146064 - protein, 10 aa, synthetic construct
QIQRGDFQNT

SEQ ID NO: 146065 - protein, 10 aa, synthetic construct
QISRGDFQNT

SEQ ID NO: 146066 - protein, 10 aa, synthetic construct
QITRGDFQNT

SEQ ID NO: 146067 - protein, 10 aa, synthetic construct
QIFRGDFQNT

SEQ ID NO: 146068 - protein, 10 aa, synthetic construct
QIGRGDFQNT

SEQ ID NO: 146069 - protein, 10 aa, synthetic construct
QIHRGDFQNT

SEQ ID NO: 146070 - protein, 10 aa, synthetic construct
QIIRGDFQNT

SEQ ID NO: 146071 - protein, 10 aa, synthetic construct
QIKRGDFQNT

SEQ ID NO: 146072 - protein, 10 aa, synthetic construct
QILRGDFQNT

SEQ ID NO: 146073 - protein, 10 aa, synthetic construct
QIMRGDFQNT

SEQ ID NO: 146074 - protein, 10 aa, synthetic construct
QIPRGDFQNT

SEQ ID NO: 146075 - protein, 10 aa, synthetic construct
QIRRGDFQNT

SEQ ID NO: 146076 - protein, 10 aa, synthetic construct
QIVRGDFQNT

SEQ ID NO: 146077 - protein, 10 aa, synthetic construct
QIWRGDFQNT

SEQ ID NO: 146078 - protein, 10 aa, synthetic construct
QIYRGDFQNT

SEQ ID NO: 146079 - protein, 10 aa, synthetic construct
QKARGDFQNT

SEQ ID NO: 146080 - protein, 10 aa, synthetic construct
QKDRGDFQNT

SEQ ID NO: 146081 - protein, 10 aa, synthetic construct
QKERGDFQNT

SEQ ID NO: 146082 - protein, 10 aa, synthetic construct
QKNRGDFQNT

SEQ ID NO: 146083 - protein, 10 aa, synthetic construct
QKQRGDFQNT

SEQ ID NO: 146084 - protein, 10 aa, synthetic construct
QKSRGDFQNT

SEQ ID NO: 146085 - protein, 10 aa, synthetic construct
QKTRGDFQNT

SEQ ID NO: 146086 - protein, 10 aa, synthetic construct
QKFRGDFQNT

SEQ ID NO: 146087 - protein, 10 aa, synthetic construct
QKGRGDFQNT

SEQ ID NO: 146088 - protein, 10 aa, synthetic construct
QKHRGDFQNT

SEQ ID NO: 146089 - protein, 10 aa, synthetic construct
QKIRGDFQNT

SEQ ID NO: 146090 - protein, 10 aa, synthetic construct
QKKRGDFQNT

SEQ ID NO: 146091 - protein, 10 aa, synthetic construct
QKLRGDFQNT

SEQ ID NO: 146092 - protein, 10 aa, synthetic construct
QKMRGDFQNT

SEQ ID NO: 146093 - protein, 10 aa, synthetic construct
QKPRGDFQNT

SEQ ID NO: 146094 - protein, 10 aa, synthetic construct
QKRRGDFQNT

SEQ ID NO: 146095 - protein, 10 aa, synthetic construct
QKVRGDFQNT

SEQ ID NO: 146096 - protein, 10 aa, synthetic construct
QKWRGDFQNT

SEQ ID NO: 146097 - protein, 10 aa, synthetic construct
QKYRGDFQNT

SEQ ID NO: 146098 - protein, 10 aa, synthetic construct
QLARGDFQNT

SEQ ID NO: 146099 - protein, 10 aa, synthetic construct
QLDRGDFQNT

SEQ ID NO: 146100 - protein, 10 aa, synthetic construct
QLERGDFQNT

SEQ ID NO: 146101 - protein, 10 aa, synthetic construct
QLNRGDFQNT

SEQ ID NO: 146102 - protein, 10 aa, synthetic construct
QLQRGDFQNT

SEQ ID NO: 146103 - protein, 10 aa, synthetic construct
QLSRGDFQNT

SEQ ID NO: 146104 - protein, 10 aa, synthetic construct
QLTRGDFQNT

SEQ ID NO: 146105 - protein, 10 aa, synthetic construct
QLFRGDFQNT

SEQ ID NO: 146106 - protein, 10 aa, synthetic construct
QLGRGDFQNT

SEQ ID NO: 146107 - protein, 10 aa, synthetic construct
QLHRGDFQNT

SEQ ID NO: 146108 - protein, 10 aa, synthetic construct
QLIRGDFQNT

SEQ ID NO: 146109 - protein, 10 aa, synthetic construct
QLKRGDFQNT

SEQ ID NO: 146110 - protein, 10 aa, synthetic construct
QLLRGDFQNT

SEQ ID NO: 146111 - protein, 10 aa, synthetic construct
QLMRGDFQNT

SEQ ID NO: 146112 - protein, 10 aa, synthetic construct
QLPRGDFQNT

SEQ ID NO: 146113 - protein, 10 aa, synthetic construct
QLRRGDFQNT

SEQ ID NO: 146114 - protein, 10 aa, synthetic construct
QLVRGDFQNT

SEQ ID NO: 146115 - protein, 10 aa, synthetic construct
QLWRGDFQNT

SEQ ID NO: 146116 - protein, 10 aa, synthetic construct
QLYRGDFQNT

SEQ ID NO: 146117 - protein, 10 aa, synthetic construct
QMARGDFQNT

SEQ ID NO: 146118 - protein, 10 aa, synthetic construct
QMDRGDFQNT

SEQ ID NO: 146119 - protein, 10 aa, synthetic construct
QMERGDFQNT

SEQ ID NO: 146120 - protein, 10 aa, synthetic construct
QMNRGDFQNT

SEQ ID NO: 146121 - protein, 10 aa, synthetic construct
QMQRGDFQNT

SEQ ID NO: 146122 - protein, 10 aa, synthetic construct
QMSRGDFQNT

SEQ ID NO: 146123 - protein, 10 aa, synthetic construct
QMTRGDFQNT

SEQ ID NO: 146124 - protein, 10 aa, synthetic construct
QMFRGDFQNT

SEQ ID NO: 146125 - protein, 10 aa, synthetic construct
QMGRGDFQNT

SEQ ID NO: 146126 - protein, 10 aa, synthetic construct
QMHRGDFQNT

SEQ ID NO: 146127 - protein, 10 aa, synthetic construct
QMIRGDFQNT

SEQ ID NO: 146128 - protein, 10 aa, synthetic construct
QMKRGDFQNT

SEQ ID NO: 146129 - protein, 10 aa, synthetic construct
QMLRGDFQNT

SEQ ID NO: 146130 - protein, 10 aa, synthetic construct
QMMRGDFQNT

SEQ ID NO: 146131 - protein, 10 aa, synthetic construct
QMPRGDFQNT

SEQ ID NO: 146132 - protein, 10 aa, synthetic construct
QMRRGDFQNT

SEQ ID NO: 146133 - protein, 10 aa, synthetic construct
QMVRGDFQNT

SEQ ID NO: 146134 - protein, 10 aa, synthetic construct
QMWRGDFQNT

SEQ ID NO: 146135 - protein, 10 aa, synthetic construct
QMYRGDFQNT

SEQ ID NO: 146136 - protein, 10 aa, synthetic construct
QPARGDFQNT

SEQ ID NO: 146137 - protein, 10 aa, synthetic construct
QPDRGDFQNT

SEQ ID NO: 146138 - protein, 10 aa, synthetic construct
QPERGDFQNT

SEQ ID NO: 146139 - protein, 10 aa, synthetic construct
QPNRGDFQNT

SEQ ID NO: 146140 - protein, 10 aa, synthetic construct
QPQRGDFQNT

SEQ ID NO: 146141 - protein, 10 aa, synthetic construct
QPSRGDFQNT

SEQ ID NO: 146142 - protein, 10 aa, synthetic construct
QPTRGDFQNT

SEQ ID NO: 146143 - protein, 10 aa, synthetic construct
QPFRGDFQNT

SEQ ID NO: 146144 - protein, 10 aa, synthetic construct
QPGRGDFQNT

SEQ ID NO: 146145 - protein, 10 aa, synthetic construct
QPHRGDFQNT

SEQ ID NO: 146146 - protein, 10 aa, synthetic construct
QPIRGDFQNT

SEQ ID NO: 146147 - protein, 10 aa, synthetic construct
QPKRGDFQNT

SEQ ID NO: 146148 - protein, 10 aa, synthetic construct
QPLRGDFQNT

SEQ ID NO: 146149 - protein, 10 aa, synthetic construct
QPMRGDFQNT

SEQ ID NO: 146150 - protein, 10 aa, synthetic construct
QPPRGDFQNT

SEQ ID NO: 146151 - protein, 10 aa, synthetic construct
QPRRGDFQNT

SEQ ID NO: 146152 - protein, 10 aa, synthetic construct
QPVRGDFQNT

SEQ ID NO: 146153 - protein, 10 aa, synthetic construct
QPWRGDFQNT

SEQ ID NO: 146154 - protein, 10 aa, synthetic construct
QPYRGDFQNT

SEQ ID NO: 146155 - protein, 10 aa, synthetic construct
QRARGDFQNT

SEQ ID NO: 146156 - protein, 10 aa, synthetic construct
QRDRGDFQNT

SEQ ID NO: 146157 - protein, 10 aa, synthetic construct
QRERGDFQNT

SEQ ID NO: 146158 - protein, 10 aa, synthetic construct
QRNRGDFQNT

SEQ ID NO: 146159 - protein, 10 aa, synthetic construct
QRQRGDFQNT

SEQ ID NO: 146160 - protein, 10 aa, synthetic construct
QRSRGDFQNT

SEQ ID NO: 146161 - protein, 10 aa, synthetic construct
QRTRGDFQNT

SEQ ID NO: 146162 - protein, 10 aa, synthetic construct
QRFRGDFQNT

SEQ ID NO: 146163 - protein, 10 aa, synthetic construct
QRGRGDFQNT

SEQ ID NO: 146164 - protein, 10 aa, synthetic construct
QRHRGDFQNT

SEQ ID NO: 146165 - protein, 10 aa, synthetic construct
QRIRGDFQNT

SEQ ID NO: 146166 - protein, 10 aa, synthetic construct
QRKRGDFQNT

SEQ ID NO: 146167 - protein, 10 aa, synthetic construct
QRLRGDFQNT

SEQ ID NO: 146168 - protein, 10 aa, synthetic construct
QRMRGDFQNT

SEQ ID NO: 146169 - protein, 10 aa, synthetic construct
QRPRGDFQNT

SEQ ID NO: 146170 - protein, 10 aa, synthetic construct
QRRRGDFQNT

SEQ ID NO: 146171 - protein, 10 aa, synthetic construct
QRVRGDFQNT

SEQ ID NO: 146172 - protein, 10 aa, synthetic construct
QRWRGDFQNT

SEQ ID NO: 146173 - protein, 10 aa, synthetic construct
QRYRGDFQNT

SEQ ID NO: 146174 - protein, 10 aa, synthetic construct
QVARGDFQNT

SEQ ID NO: 146175 - protein, 10 aa, synthetic construct
QVDRGDFQNT

SEQ ID NO: 146176 - protein, 10 aa, synthetic construct
QVERGDFQNT

SEQ ID NO: 146177 - protein, 10 aa, synthetic construct
QVNRGDFQNT

SEQ ID NO: 146178 - protein, 10 aa, synthetic construct
QVQRGDFQNT

SEQ ID NO: 146179 - protein, 10 aa, synthetic construct
QVSRGDFQNT

SEQ ID NO: 146180 - protein, 10 aa, synthetic construct
QVTRGDFQNT

SEQ ID NO: 146181 - protein, 10 aa, synthetic construct
QVFRGDFQNT

SEQ ID NO: 146182 - protein, 10 aa, synthetic construct
QVGRGDFQNT

SEQ ID NO: 146183 - protein, 10 aa, synthetic construct
QVHRGDFQNT

SEQ ID NO: 146184 - protein, 10 aa, synthetic construct
QVIRGDFQNT

SEQ ID NO: 146185 - protein, 10 aa, synthetic construct
QVKRGDFQNT

SEQ ID NO: 146186 - protein, 10 aa, synthetic construct
QVLRGDFQNT

SEQ ID NO: 146187 - protein, 10 aa, synthetic construct
QVMRGDFQNT

SEQ ID NO: 146188 - protein, 10 aa, synthetic construct
QVPRGDFQNT

SEQ ID NO: 146189 - protein, 10 aa, synthetic construct
QVRRGDFQNT

SEQ ID NO: 146190 - protein, 10 aa, synthetic construct
QVVRGDFQNT

SEQ ID NO: 146191 - protein, 10 aa, synthetic construct
QVWRGDFQNT

SEQ ID NO: 146192 - protein, 10 aa, synthetic construct
QVYRGDFQNT

SEQ ID NO: 146193 - protein, 10 aa, synthetic construct
QWARGDFQNT

SEQ ID NO: 146194 - protein, 10 aa, synthetic construct
QWDRGDFQNT

SEQ ID NO: 146195 - protein, 10 aa, synthetic construct
QWERGDFQNT

SEQ ID NO: 146196 - protein, 10 aa, synthetic construct
QWNRGDFQNT

SEQ ID NO: 146197 - protein, 10 aa, synthetic construct
QWQRGDFQNT

SEQ ID NO: 146198 - protein, 10 aa, synthetic construct
QWSRGDFQNT

SEQ ID NO: 146199 - protein, 10 aa, synthetic construct
QWTRGDFQNT

SEQ ID NO: 146200 - protein, 10 aa, synthetic construct
QWFRGDFQNT

SEQ ID NO: 146201 - protein, 10 aa, synthetic construct
QWGRGDFQNT

SEQ ID NO: 146202 - protein, 10 aa, synthetic construct
QWHRGDFQNT

SEQ ID NO: 146203 - protein, 10 aa, synthetic construct
QWIRGDFQNT

SEQ ID NO: 146204 - protein, 10 aa, synthetic construct
QWKRGDFQNT

SEQ ID NO: 146205 - protein, 10 aa, synthetic construct
QWLRGDFQNT

SEQ ID NO: 146206 - protein, 10 aa, synthetic construct
QWMRGDFQNT

SEQ ID NO: 146207 - protein, 10 aa, synthetic construct
QWPRGDFQNT

SEQ ID NO: 146208 - protein, 10 aa, synthetic construct
QWRRGDFQNT

SEQ ID NO: 146209 - protein, 10 aa, synthetic construct
QWVRGDFQNT

SEQ ID NO: 146210 - protein, 10 aa, synthetic construct
QWWRGDFQNT

SEQ ID NO: 146211 - protein, 10 aa, synthetic construct
QWYRGDFQNT

SEQ ID NO: 146212 - protein, 10 aa, synthetic construct
QYARGDFQNT

SEQ ID NO: 146213 - protein, 10 aa, synthetic construct
QYDRGDFQNT

SEQ ID NO: 146214 - protein, 10 aa, synthetic construct
QYERGDFQNT

SEQ ID NO: 146215 - protein, 10 aa, synthetic construct
QYNRGDFQNT

SEQ ID NO: 146216 - protein, 10 aa, synthetic construct
QYQRGDFQNT

SEQ ID NO: 146217 - protein, 10 aa, synthetic construct
QYSRGDFQNT

SEQ ID NO: 146218 - protein, 10 aa, synthetic construct
QYTRGDFQNT

SEQ ID NO: 146219 - protein, 10 aa, synthetic construct
QYFRGDFQNT

SEQ ID NO: 146220 - protein, 10 aa, synthetic construct
QYGRGDFQNT

SEQ ID NO: 146221 - protein, 10 aa, synthetic construct
QYHRGDFQNT

SEQ ID NO: 146222 - protein, 10 aa, synthetic construct
QYIRGDFQNT

SEQ ID NO: 146223 - protein, 10 aa, synthetic construct
QYKRGDFQNT

SEQ ID NO: 146224 - protein, 10 aa, synthetic construct
QYLRGDFQNT

SEQ ID NO: 146225 - protein, 10 aa, synthetic construct
QYMRGDFQNT

SEQ ID NO: 146226 - protein, 10 aa, synthetic construct
QYPRGDFQNT

SEQ ID NO: 146227 - protein, 10 aa, synthetic construct
QYRRGDFQNT

SEQ ID NO: 146228 - protein, 10 aa, synthetic construct
QYVRGDFQNT

SEQ ID NO: 146229 - protein, 10 aa, synthetic construct
QYWRGDFQNT

SEQ ID NO: 146230 - protein, 10 aa, synthetic construct
QYYRGDFQNT

SEQ ID NO: 146231 - protein, 10 aa, synthetic construct
SAARGDFQNT

SEQ ID NO: 146232 - protein, 10 aa, synthetic construct
SADRGDFQNT

SEQ ID NO: 146233 - protein, 10 aa, synthetic construct
SAERGDFQNT

SEQ ID NO: 146234 - protein, 10 aa, synthetic construct
SANRGDFQNT

SEQ ID NO: 146235 - protein, 10 aa, synthetic construct
SAQRGDFQNT

SEQ ID NO: 146236 - protein, 10 aa, synthetic construct
SASRGDFQNT

SEQ ID NO: 146237 - protein, 10 aa, synthetic construct
SATRGDFQNT

SEQ ID NO: 146238 - protein, 10 aa, synthetic construct
SAFRGDFQNT

SEQ ID NO: 146239 - protein, 10 aa, synthetic construct
SAGRGDFQNT

SEQ ID NO: 146240 - protein, 10 aa, synthetic construct
SAHRGDFQNT

SEQ ID NO: 146241 - protein, 10 aa, synthetic construct
SAIRGDFQNT

SEQ ID NO: 146242 - protein, 10 aa, synthetic construct
SAKRGDFQNT

SEQ ID NO: 146243 - protein, 10 aa, synthetic construct
SALRGDFQNT

SEQ ID NO: 146244 - protein, 10 aa, synthetic construct
SAMRGDFQNT

SEQ ID NO: 146245 - protein, 10 aa, synthetic construct
SAPRGDFQNT

SEQ ID NO: 146246 - protein, 10 aa, synthetic construct
SARRGDFQNT

SEQ ID NO: 146247 - protein, 10 aa, synthetic construct
SAVRGDFQNT

SEQ ID NO: 146248 - protein, 10 aa, synthetic construct
SAWRGDFQNT

SEQ ID NO: 146249 - protein, 10 aa, synthetic construct
SAYRGDFQNT

SEQ ID NO: 146250 - protein, 10 aa, synthetic construct
SDARGDFQNT

SEQ ID NO: 146251 - protein, 10 aa, synthetic construct
SDDRGDFQNT

SEQ ID NO: 146252 - protein, 10 aa, synthetic construct
SDERGDFQNT

SEQ ID NO: 146253 - protein, 10 aa, synthetic construct
SDNRGDFQNT

SEQ ID NO: 146254 - protein, 10 aa, synthetic construct
SDQRGDFQNT

SEQ ID NO: 146255 - protein, 10 aa, synthetic construct
SDSRGDFQNT

SEQ ID NO: 146256 - protein, 10 aa, synthetic construct
SDTRGDFQNT

SEQ ID NO: 146257 - protein, 10 aa, synthetic construct
SDFRGDFQNT

SEQ ID NO: 146258 - protein, 10 aa, synthetic construct
SDGRGDFQNT

SEQ ID NO: 146259 - protein, 10 aa, synthetic construct
SDHRGDFQNT

SEQ ID NO: 146260 - protein, 10 aa, synthetic construct
SDIRGDFQNT

SEQ ID NO: 146261 - protein, 10 aa, synthetic construct
SDKRGDFQNT

SEQ ID NO: 146262 - protein, 10 aa, synthetic construct
SDLRGDFQNT

SEQ ID NO: 146263 - protein, 10 aa, synthetic construct
SDMRGDFQNT

SEQ ID NO: 146264 - protein, 10 aa, synthetic construct
SDPRGDFQNT

SEQ ID NO: 146265 - protein, 10 aa, synthetic construct
SDRRGDFQNT

SEQ ID NO: 146266 - protein, 10 aa, synthetic construct
SDVRGDFQNT

SEQ ID NO: 146267 - protein, 10 aa, synthetic construct
SDWRGDFQNT

SEQ ID NO: 146268 - protein, 10 aa, synthetic construct
SDYRGDFQNT

SEQ ID NO: 146269 - protein, 10 aa, synthetic construct
SEARGDFQNT

SEQ ID NO: 146270 - protein, 10 aa, synthetic construct
SEDRGDFQNT

SEQ ID NO: 146271 - protein, 10 aa, synthetic construct
SEERGDFQNT

SEQ ID NO: 146272 - protein, 10 aa, synthetic construct
SENRGDFQNT

SEQ ID NO: 146273 - protein, 10 aa, synthetic construct
SEQRGDFQNT

SEQ ID NO: 146274 - protein, 10 aa, synthetic construct
SESRGDFQNT

SEQ ID NO: 146275 - protein, 10 aa, synthetic construct
SETRGDFQNT

SEQ ID NO: 146276 - protein, 10 aa, synthetic construct
SEFRGDFQNT

SEQ ID NO: 146277 - protein, 10 aa, synthetic construct
SEGRGDFQNT

SEQ ID NO: 146278 - protein, 10 aa, synthetic construct
SEHRGDFQNT

SEQ ID NO: 146279 - protein, 10 aa, synthetic construct
SEIRGDFQNT

SEQ ID NO: 146280 - protein, 10 aa, synthetic construct
SEKRGDFQNT

SEQ ID NO: 146281 - protein, 10 aa, synthetic construct
SELRGDFQNT

SEQ ID NO: 146282 - protein, 10 aa, synthetic construct
SEMRGDFQNT

SEQ ID NO: 146283 - protein, 10 aa, synthetic construct
SEPRGDFQNT

SEQ ID NO: 146284 - protein, 10 aa, synthetic construct
SERRGDFQNT

SEQ ID NO: 146285 - protein, 10 aa, synthetic construct
SEVRGDFQNT

SEQ ID NO: 146286 - protein, 10 aa, synthetic construct
SEWRGDFQNT

SEQ ID NO: 146287 - protein, 10 aa, synthetic construct
SEYRGDFQNT

SEQ ID NO: 146288 - protein, 10 aa, synthetic construct
SNARGDFQNT

SEQ ID NO: 146289 - protein, 10 aa, synthetic construct
SNDRGDFQNT

SEQ ID NO: 146290 - protein, 10 aa, synthetic construct
SNERGDFQNT

SEQ ID NO: 146291 - protein, 10 aa, synthetic construct
SNNRGDFQNT

SEQ ID NO: 146292 - protein, 10 aa, synthetic construct
SNQRGDFQNT

SEQ ID NO: 146293 - protein, 10 aa, synthetic construct
SNSRGDFQNT

SEQ ID NO: 146294 - protein, 10 aa, synthetic construct
SNTRGDFQNT

SEQ ID NO: 146295 - protein, 10 aa, synthetic construct
SNFRGDFQNT

SEQ ID NO: 146296 - protein, 10 aa, synthetic construct
SNGRGDFQNT

SEQ ID NO: 146297 - protein, 10 aa, synthetic construct
SNHRGDFQNT

SEQ ID NO: 146298 - protein, 10 aa, synthetic construct
SNIRGDFQNT

SEQ ID NO: 146299 - protein, 10 aa, synthetic construct
SNKRGDFQNT

SEQ ID NO: 146300 - protein, 10 aa, synthetic construct
SNLRGDFQNT

SEQ ID NO: 146301 - protein, 10 aa, synthetic construct
SNMRGDFQNT

SEQ ID NO: 146302 - protein, 10 aa, synthetic construct
SNPRGDFQNT

SEQ ID NO: 146303 - protein, 10 aa, synthetic construct
SNRRGDFQNT

SEQ ID NO: 146304 - protein, 10 aa, synthetic construct
SNVRGDFQNT

SEQ ID NO: 146305 - protein, 10 aa, synthetic construct
SNWRGDFQNT

SEQ ID NO: 146306 - protein, 10 aa, synthetic construct
SNYRGDFQNT

SEQ ID NO: 146307 - protein, 10 aa, synthetic construct
SQARGDFQNT

SEQ ID NO: 146308 - protein, 10 aa, synthetic construct
SQDRGDFQNT

SEQ ID NO: 146309 - protein, 10 aa, synthetic construct
SQERGDFQNT

SEQ ID NO: 146310 - protein, 10 aa, synthetic construct
SQNRGDFQNT

SEQ ID NO: 146311 - protein, 10 aa, synthetic construct
SQQRGDFQNT

SEQ ID NO: 146312 - protein, 10 aa, synthetic construct
SQSRGDFQNT

SEQ ID NO: 146313 - protein, 10 aa, synthetic construct
SQTRGDFQNT

SEQ ID NO: 146314 - protein, 10 aa, synthetic construct
SQFRGDFQNT

SEQ ID NO: 146315 - protein, 10 aa, synthetic construct
SQGRGDFQNT

SEQ ID NO: 146316 - protein, 10 aa, synthetic construct
SQHRGDFQNT

SEQ ID NO: 146317 - protein, 10 aa, synthetic construct
SQIRGDFQNT

SEQ ID NO: 146318 - protein, 10 aa, synthetic construct
SQKRGDFQNT

SEQ ID NO: 146319 - protein, 10 aa, synthetic construct
SQLRGDFQNT

SEQ ID NO: 146320 - protein, 10 aa, synthetic construct
SQMRGDFQNT

SEQ ID NO: 146321 - protein, 10 aa, synthetic construct
SQPRGDFQNT

SEQ ID NO: 146322 - protein, 10 aa, synthetic construct
SQRRGDFQNT

SEQ ID NO: 146323 - protein, 10 aa, synthetic construct
SQVRGDFQNT

SEQ ID NO: 146324 - protein, 10 aa, synthetic construct
SQWRGDFQNT

SEQ ID NO: 146325 - protein, 10 aa, synthetic construct
SQYRGDFQNT

SEQ ID NO: 146326 - protein, 10 aa, synthetic construct
SSARGDFQNT

SEQ ID NO: 146327 - protein, 10 aa, synthetic construct
SSDRGDFQNT

SEQ ID NO: 146328 - protein, 10 aa, synthetic construct
SSERGDFQNT

SEQ ID NO: 146329 - protein, 10 aa, synthetic construct
SSNRGDFQNT

SEQ ID NO: 146330 - protein, 10 aa, synthetic construct
SSQRGDFQNT

SEQ ID NO: 146331 - protein, 10 aa, synthetic construct
SSSRGDFQNT

SEQ ID NO: 146332 - protein, 10 aa, synthetic construct
SSTRGDFQNT

SEQ ID NO: 146333 - protein, 10 aa, synthetic construct
SSFRGDFQNT

SEQ ID NO: 146334 - protein, 10 aa, synthetic construct
SSGRGDFQNT

SEQ ID NO: 146335 - protein, 10 aa, synthetic construct
SSHRGDFQNT

SEQ ID NO: 146336 - protein, 10 aa, synthetic construct
SSIRGDFQNT

SEQ ID NO: 146337 - protein, 10 aa, synthetic construct
SSKRGDFQNT

SEQ ID NO: 146338 - protein, 10 aa, synthetic construct
SSLRGDFQNT

SEQ ID NO: 146339 - protein, 10 aa, synthetic construct
SSMRGDFQNT

SEQ ID NO: 146340 - protein, 10 aa, synthetic construct
SSPRGDFQNT

SEQ ID NO: 146341 - protein, 10 aa, synthetic construct
SSRRGDFQNT

SEQ ID NO: 146342 - protein, 10 aa, synthetic construct
SSVRGDFQNT

SEQ ID NO: 146343 - protein, 10 aa, synthetic construct
SSWRGDFQNT

SEQ ID NO: 146344 - protein, 10 aa, synthetic construct
SSYRGDFQNT

SEQ ID NO: 146345 - protein, 10 aa, synthetic construct
STARGDFQNT

SEQ ID NO: 146346 - protein, 10 aa, synthetic construct
STDRGDFQNT

SEQ ID NO: 146347 - protein, 10 aa, synthetic construct
STERGDFQNT

SEQ ID NO: 146348 - protein, 10 aa, synthetic construct
STNRGDFQNT

SEQ ID NO: 146349 - protein, 10 aa, synthetic construct
STQRGDFQNT

SEQ ID NO: 146350 - protein, 10 aa, synthetic construct
STSRGDFQNT

SEQ ID NO: 146351 - protein, 10 aa, synthetic construct
STTRGDFQNT

SEQ ID NO: 146352 - protein, 10 aa, synthetic construct
STFRGDFQNT

SEQ ID NO: 146353 - protein, 10 aa, synthetic construct
STGRGDFQNT

SEQ ID NO: 146354 - protein, 10 aa, synthetic construct
STHRGDFQNT

SEQ ID NO: 146355 - protein, 10 aa, synthetic construct
STIRGDFQNT

SEQ ID NO: 146356 - protein, 10 aa, synthetic construct
STKRGDFQNT

SEQ ID NO: 146357 - protein, 10 aa, synthetic construct
STLRGDFQNT

SEQ ID NO: 146358 - protein, 10 aa, synthetic construct
STMRGDFQNT

SEQ ID NO: 146359 - protein, 10 aa, synthetic construct
STPRGDFQNT

SEQ ID NO: 146360 - protein, 10 aa, synthetic construct
STRRGDFQNT

SEQ ID NO: 146361 - protein, 10 aa, synthetic construct
STVRGDFQNT

SEQ ID NO: 146362 - protein, 10 aa, synthetic construct
STWRGDFQNT

SEQ ID NO: 146363 - protein, 10 aa, synthetic construct
STYRGDFQNT

SEQ ID NO: 146364 - protein, 10 aa, synthetic construct
SFARGDFQNT

SEQ ID NO: 146365 - protein, 10 aa, synthetic construct
SFDRGDFQNT

SEQ ID NO: 146366 - protein, 10 aa, synthetic construct
SFERGDFQNT

SEQ ID NO: 146367 - protein, 10 aa, synthetic construct
SFNRGDFQNT

SEQ ID NO: 146368 - protein, 10 aa, synthetic construct
SFQRGDFQNT

SEQ ID NO: 146369 - protein, 10 aa, synthetic construct
SFSRGDFQNT

SEQ ID NO: 146370 - protein, 10 aa, synthetic construct
SFTRGDFQNT

SEQ ID NO: 146371 - protein, 10 aa, synthetic construct
SFFRGDFQNT

SEQ ID NO: 146372 - protein, 10 aa, synthetic construct
SFGRGDFQNT

SEQ ID NO: 146373 - protein, 10 aa, synthetic construct
SFHRGDFQNT

SEQ ID NO: 146374 - protein, 10 aa, synthetic construct
SFIRGDFQNT

SEQ ID NO: 146375 - protein, 10 aa, synthetic construct
SFKRGDFQNT

SEQ ID NO: 146376 - protein, 10 aa, synthetic construct
SFLRGDFQNT

SEQ ID NO: 146377 - protein, 10 aa, synthetic construct
SFMRGDFQNT

SEQ ID NO: 146378 - protein, 10 aa, synthetic construct
SFPRGDFQNT

SEQ ID NO: 146379 - protein, 10 aa, synthetic construct
SFRRGDFQNT

SEQ ID NO: 146380 - protein, 10 aa, synthetic construct
SFVRGDFQNT

SEQ ID NO: 146381 - protein, 10 aa, synthetic construct
SFWRGDFQNT

SEQ ID NO: 146382 - protein, 10 aa, synthetic construct
SFYRGDFQNT

SEQ ID NO: 146383 - protein, 10 aa, synthetic construct
SGARGDFQNT

SEQ ID NO: 146384 - protein, 10 aa, synthetic construct
SGDRGDFQNT

SEQ ID NO: 146385 - protein, 10 aa, synthetic construct
SGERGDFQNT

SEQ ID NO: 146386 - protein, 10 aa, synthetic construct
SGNRGDFQNT

SEQ ID NO: 146387 - protein, 10 aa, synthetic construct
SGQRGDFQNT

SEQ ID NO: 146388 - protein, 10 aa, synthetic construct
SGSRGDFQNT

SEQ ID NO: 146389 - protein, 10 aa, synthetic construct
SGTRGDFQNT

SEQ ID NO: 146390 - protein, 10 aa, synthetic construct
SGFRGDFQNT

SEQ ID NO: 146391 - protein, 10 aa, synthetic construct
SGGRGDFQNT

SEQ ID NO: 146392 - protein, 10 aa, synthetic construct
SGHRGDFQNT

SEQ ID NO: 146393 - protein, 10 aa, synthetic construct
SGIRGDFQNT

SEQ ID NO: 146394 - protein, 10 aa, synthetic construct
SGKRGDFQNT

SEQ ID NO: 146395 - protein, 10 aa, synthetic construct
SGLRGDFQNT

SEQ ID NO: 146396 - protein, 10 aa, synthetic construct
SGMRGDFQNT

SEQ ID NO: 146397 - protein, 10 aa, synthetic construct
SGPRGDFQNT

SEQ ID NO: 146398 - protein, 10 aa, synthetic construct
SGRRGDFQNT

SEQ ID NO: 146399 - protein, 10 aa, synthetic construct
SGVRGDFQNT

SEQ ID NO: 146400 - protein, 10 aa, synthetic construct
SGWRGDFQNT

SEQ ID NO: 146401 - protein, 10 aa, synthetic construct
SGYRGDFQNT

SEQ ID NO: 146402 - protein, 10 aa, synthetic construct
SHARGDFQNT

SEQ ID NO: 146403 - protein, 10 aa, synthetic construct
SHDRGDFQNT

SEQ ID NO: 146404 - protein, 10 aa, synthetic construct
SHERGDFQNT

SEQ ID NO: 146405 - protein, 10 aa, synthetic construct
SHNRGDFQNT

SEQ ID NO: 146406 - protein, 10 aa, synthetic construct
SHQRGDFQNT

SEQ ID NO: 146407 - protein, 10 aa, synthetic construct
SHSRGDFQNT

SEQ ID NO: 146408 - protein, 10 aa, synthetic construct
SHTRGDFQNT

SEQ ID NO: 146409 - protein, 10 aa, synthetic construct
SHFRGDFQNT

SEQ ID NO: 146410 - protein, 10 aa, synthetic construct
SHGRGDFQNT

SEQ ID NO: 146411 - protein, 10 aa, synthetic construct
SHHRGDFQNT

SEQ ID NO: 146412 - protein, 10 aa, synthetic construct
SHIRGDFQNT

SEQ ID NO: 146413 - protein, 10 aa, synthetic construct
SHKRGDFQNT

SEQ ID NO: 146414 - protein, 10 aa, synthetic construct
SHLRGDFQNT

SEQ ID NO: 146415 - protein, 10 aa, synthetic construct
SHMRGDFQNT

SEQ ID NO: 146416 - protein, 10 aa, synthetic construct
SHPRGDFQNT

SEQ ID NO: 146417 - protein, 10 aa, synthetic construct
SHRRGDFQNT

SEQ ID NO: 146418 - protein, 10 aa, synthetic construct
SHVRGDFQNT

SEQ ID NO: 146419 - protein, 10 aa, synthetic construct
SHWRGDFQNT

SEQ ID NO: 146420 - protein, 10 aa, synthetic construct
SHYRGDFQNT

SEQ ID NO: 146421 - protein, 10 aa, synthetic construct
SIARGDFQNT

SEQ ID NO: 146422 - protein, 10 aa, synthetic construct
SIDRGDFQNT

SEQ ID NO: 146423 - protein, 10 aa, synthetic construct
SIERGDFQNT

SEQ ID NO: 146424 - protein, 10 aa, synthetic construct
SINRGDFQNT

SEQ ID NO: 146425 - protein, 10 aa, synthetic construct
SIQRGDFQNT

SEQ ID NO: 146426 - protein, 10 aa, synthetic construct
SISRGDFQNT

SEQ ID NO: 146427 - protein, 10 aa, synthetic construct
SITRGDFQNT

SEQ ID NO: 146428 - protein, 10 aa, synthetic construct
SIFRGDFQNT

SEQ ID NO: 146429 - protein, 10 aa, synthetic construct
SIGRGDFQNT

SEQ ID NO: 146430 - protein, 10 aa, synthetic construct
SIHRGDFQNT

SEQ ID NO: 146431 - protein, 10 aa, synthetic construct
SIIRGDFQNT

SEQ ID NO: 146432 - protein, 10 aa, synthetic construct
SIKRGDFQNT

SEQ ID NO: 146433 - protein, 10 aa, synthetic construct
SILRGDFQNT

SEQ ID NO: 146434 - protein, 10 aa, synthetic construct
SIMRGDFQNT

SEQ ID NO: 146435 - protein, 10 aa, synthetic construct
SIPRGDFQNT

SEQ ID NO: 146436 - protein, 10 aa, synthetic construct
SIRRGDFQNT

SEQ ID NO: 146437 - protein, 10 aa, synthetic construct
SIVRGDFQNT

SEQ ID NO: 146438 - protein, 10 aa, synthetic construct
SIWRGDFQNT

SEQ ID NO: 146439 - protein, 10 aa, synthetic construct
SIYRGDFQNT

SEQ ID NO: 146440 - protein, 10 aa, synthetic construct
SKARGDFQNT

SEQ ID NO: 146441 - protein, 10 aa, synthetic construct
SKDRGDFQNT

SEQ ID NO: 146442 - protein, 10 aa, synthetic construct
SKERGDFQNT

SEQ ID NO: 146443 - protein, 10 aa, synthetic construct
SKNRGDFQNT

SEQ ID NO: 146444 - protein, 10 aa, synthetic construct
SKQRGDFQNT

SEQ ID NO: 146445 - protein, 10 aa, synthetic construct
SKSRGDFQNT

SEQ ID NO: 146446 - protein, 10 aa, synthetic construct
SKTRGDFQNT

SEQ ID NO: 146447 - protein, 10 aa, synthetic construct
SKFRGDFQNT

SEQ ID NO: 146448 - protein, 10 aa, synthetic construct
SKGRGDFQNT

SEQ ID NO: 146449 - protein, 10 aa, synthetic construct
SKHRGDFQNT

SEQ ID NO: 146450 - protein, 10 aa, synthetic construct
SKIRGDFQNT

SEQ ID NO: 146451 - protein, 10 aa, synthetic construct
SKKRGDFQNT

SEQ ID NO: 146452 - protein, 10 aa, synthetic construct
SKLRGDFQNT

SEQ ID NO: 146453 - protein, 10 aa, synthetic construct
SKMRGDFQNT

SEQ ID NO: 146454 - protein, 10 aa, synthetic construct
SKPRGDFQNT

SEQ ID NO: 146455 - protein, 10 aa, synthetic construct
SKRRGDFQNT

SEQ ID NO: 146456 - protein, 10 aa, synthetic construct
SKVRGDFQNT

SEQ ID NO: 146457 - protein, 10 aa, synthetic construct
SKWRGDFQNT

SEQ ID NO: 146458 - protein, 10 aa, synthetic construct
SKYRGDFQNT

SEQ ID NO: 146459 - protein, 10 aa, synthetic construct
SLARGDFQNT

SEQ ID NO: 146460 - protein, 10 aa, synthetic construct
SLDRGDFQNT

SEQ ID NO: 146461 - protein, 10 aa, synthetic construct
SLERGDFQNT

SEQ ID NO: 146462 - protein, 10 aa, synthetic construct
SLNRGDFQNT

SEQ ID NO: 146463 - protein, 10 aa, synthetic construct
SLQRGDFQNT

SEQ ID NO: 146464 - protein, 10 aa, synthetic construct
SLSRGDFQNT

SEQ ID NO: 146465 - protein, 10 aa, synthetic construct
SLTRGDFQNT

SEQ ID NO: 146466 - protein, 10 aa, synthetic construct
SLFRGDFQNT

SEQ ID NO: 146467 - protein, 10 aa, synthetic construct
SLGRGDFQNT

SEQ ID NO: 146468 - protein, 10 aa, synthetic construct
SLHRGDFQNT

SEQ ID NO: 146469 - protein, 10 aa, synthetic construct
SLIRGDFQNT

SEQ ID NO: 146470 - protein, 10 aa, synthetic construct
SLKRGDFQNT

SEQ ID NO: 146471 - protein, 10 aa, synthetic construct
SLLRGDFQNT

SEQ ID NO: 146472 - protein, 10 aa, synthetic construct
SLMRGDFQNT

SEQ ID NO: 146473 - protein, 10 aa, synthetic construct
SLPRGDFQNT

SEQ ID NO: 146474 - protein, 10 aa, synthetic construct
SLRRGDFQNT

SEQ ID NO: 146475 - protein, 10 aa, synthetic construct
SLVRGDFQNT

SEQ ID NO: 146476 - protein, 10 aa, synthetic construct
SLWRGDFQNT

SEQ ID NO: 146477 - protein, 10 aa, synthetic construct
SLYRGDFQNT

SEQ ID NO: 146478 - protein, 10 aa, synthetic construct
SMARGDFQNT

SEQ ID NO: 146479 - protein, 10 aa, synthetic construct
SMDRGDFQNT

SEQ ID NO: 146480 - protein, 10 aa, synthetic construct
SMERGDFQNT

SEQ ID NO: 146481 - protein, 10 aa, synthetic construct
SMNRGDFQNT

SEQ ID NO: 146482 - protein, 10 aa, synthetic construct
SMQRGDFQNT

SEQ ID NO: 146483 - protein, 10 aa, synthetic construct
SMSRGDFQNT

SEQ ID NO: 146484 - protein, 10 aa, synthetic construct
SMTRGDFQNT

SEQ ID NO: 146485 - protein, 10 aa, synthetic construct
SMFRGDFQNT

SEQ ID NO: 146486 - protein, 10 aa, synthetic construct
SMGRGDFQNT

SEQ ID NO: 146487 - protein, 10 aa, synthetic construct
SMHRGDFQNT

SEQ ID NO: 146488 - protein, 10 aa, synthetic construct
SMIRGDFQNT

SEQ ID NO: 146489 - protein, 10 aa, synthetic construct
SMKRGDFQNT

SEQ ID NO: 146490 - protein, 10 aa, synthetic construct
SMLRGDFQNT

SEQ ID NO: 146491 - protein, 10 aa, synthetic construct
SMMRGDFQNT

SEQ ID NO: 146492 - protein, 10 aa, synthetic construct
SMPRGDFQNT

SEQ ID NO: 146493 - protein, 10 aa, synthetic construct
SMRRGDFQNT

SEQ ID NO: 146494 - protein, 10 aa, synthetic construct
SMVRGDFQNT

SEQ ID NO: 146495 - protein, 10 aa, synthetic construct
SMWRGDFQNT

SEQ ID NO: 146496 - protein, 10 aa, synthetic construct
SMYRGDFQNT

SEQ ID NO: 146497 - protein, 10 aa, synthetic construct
SPARGDFQNT

SEQ ID NO: 146498 - protein, 10 aa, synthetic construct
SPDRGDFQNT

SEQ ID NO: 146499 - protein, 10 aa, synthetic construct
SPERGDFQNT

SEQ ID NO: 146500 - protein, 10 aa, synthetic construct
SPNRGDFQNT

SEQ ID NO: 146501 - protein, 10 aa, synthetic construct
SPQRGDFQNT

SEQ ID NO: 146502 - protein, 10 aa, synthetic construct
SPSRGDFQNT

SEQ ID NO: 146503 - protein, 10 aa, synthetic construct
SPTRGDFQNT

SEQ ID NO: 146504 - protein, 10 aa, synthetic construct
SPFRGDFQNT

SEQ ID NO: 146505 - protein, 10 aa, synthetic construct
SPGRGDFQNT

SEQ ID NO: 146506 - protein, 10 aa, synthetic construct
SPHRGDFQNT

SEQ ID NO: 146507 - protein, 10 aa, synthetic construct
SPIRGDFQNT

SEQ ID NO: 146508 - protein, 10 aa, synthetic construct
SPKRGDFQNT

SEQ ID NO: 146509 - protein, 10 aa, synthetic construct
SPLRGDFQNT

SEQ ID NO: 146510 - protein, 10 aa, synthetic construct
SPMRGDFQNT

SEQ ID NO: 146511 - protein, 10 aa, synthetic construct
SPPRGDFQNT

SEQ ID NO: 146512 - protein, 10 aa, synthetic construct
SPRRGDFQNT

SEQ ID NO: 146513 - protein, 10 aa, synthetic construct
SPVRGDFQNT

SEQ ID NO: 146514 - protein, 10 aa, synthetic construct
SPWRGDFQNT

SEQ ID NO: 146515 - protein, 10 aa, synthetic construct
SPYRGDFQNT

SEQ ID NO: 146516 - protein, 10 aa, synthetic construct
SRARGDFQNT

SEQ ID NO: 146517 - protein, 10 aa, synthetic construct
SRDRGDFQNT

SEQ ID NO: 146518 - protein, 10 aa, synthetic construct
SRERGDFQNT

SEQ ID NO: 146519 - protein, 10 aa, synthetic construct
SRNRGDFQNT

SEQ ID NO: 146520 - protein, 10 aa, synthetic construct
SRQRGDFQNT

SEQ ID NO: 146521 - protein, 10 aa, synthetic construct
SRSRGDFQNT

SEQ ID NO: 146522 - protein, 10 aa, synthetic construct
SRTRGDFQNT

SEQ ID NO: 146523 - protein, 10 aa, synthetic construct
SRFRGDFQNT

SEQ ID NO: 146524 - protein, 10 aa, synthetic construct
SRGRGDFQNT

SEQ ID NO: 146525 - protein, 10 aa, synthetic construct
SRHRGDFQNT

SEQ ID NO: 146526 - protein, 10 aa, synthetic construct
SRIRGDFQNT

SEQ ID NO: 146527 - protein, 10 aa, synthetic construct
SRKRGDFQNT

SEQ ID NO: 146528 - protein, 10 aa, synthetic construct
SRLRGDFQNT

SEQ ID NO: 146529 - protein, 10 aa, synthetic construct
SRMRGDFQNT

SEQ ID NO: 146530 - protein, 10 aa, synthetic construct
SRPRGDFQNT

SEQ ID NO: 146531 - protein, 10 aa, synthetic construct
SRRRGDFQNT

SEQ ID NO: 146532 - protein, 10 aa, synthetic construct
SRVRGDFQNT

SEQ ID NO: 146533 - protein, 10 aa, synthetic construct
SRWRGDFQNT

SEQ ID NO: 146534 - protein, 10 aa, synthetic construct
SRYRGDFQNT

SEQ ID NO: 146535 - protein, 10 aa, synthetic construct
SVARGDFQNT

SEQ ID NO: 146536 - protein, 10 aa, synthetic construct
SVDRGDFQNT

SEQ ID NO: 146537 - protein, 10 aa, synthetic construct
SVERGDFQNT

SEQ ID NO: 146538 - protein, 10 aa, synthetic construct
SVNRGDFQNT

SEQ ID NO: 146539 - protein, 10 aa, synthetic construct
SVQRGDFQNT

SEQ ID NO: 146540 - protein, 10 aa, synthetic construct
SVSRGDFQNT

SEQ ID NO: 146541 - protein, 10 aa, synthetic construct
SVTRGDFQNT

SEQ ID NO: 146542 - protein, 10 aa, synthetic construct
SVFRGDFQNT

SEQ ID NO: 146543 - protein, 10 aa, synthetic construct
SVGRGDFQNT

SEQ ID NO: 146544 - protein, 10 aa, synthetic construct
SVHRGDFQNT

SEQ ID NO: 146545 - protein, 10 aa, synthetic construct
SVIRGDFQNT

SEQ ID NO: 146546 - protein, 10 aa, synthetic construct
SVKRGDFQNT

SEQ ID NO: 146547 - protein, 10 aa, synthetic construct
SVLRGDFQNT

SEQ ID NO: 146548 - protein, 10 aa, synthetic construct
SVMRGDFQNT

SEQ ID NO: 146549 - protein, 10 aa, synthetic construct
SVPRGDFQNT

SEQ ID NO: 146550 - protein, 10 aa, synthetic construct
SVRRGDFQNT

SEQ ID NO: 146551 - protein, 10 aa, synthetic construct
SVVRGDFQNT

SEQ ID NO: 146552 - protein, 10 aa, synthetic construct
SVWRGDFQNT

SEQ ID NO: 146553 - protein, 10 aa, synthetic construct
SVYRGDFQNT

SEQ ID NO: 146554 - protein, 10 aa, synthetic construct
SWARGDFQNT

SEQ ID NO: 146555 - protein, 10 aa, synthetic construct
SWDRGDFQNT

SEQ ID NO: 146556 - protein, 10 aa, synthetic construct
SWERGDFQNT

SEQ ID NO: 146557 - protein, 10 aa, synthetic construct
SWNRGDFQNT

SEQ ID NO: 146558 - protein, 10 aa, synthetic construct
SWQRGDFQNT

SEQ ID NO: 146559 - protein, 10 aa, synthetic construct
SWSRGDFQNT

SEQ ID NO: 146560 - protein, 10 aa, synthetic construct
SWTRGDFQNT

SEQ ID NO: 146561 - protein, 10 aa, synthetic construct
SWFRGDFQNT

SEQ ID NO: 146562 - protein, 10 aa, synthetic construct
SWGRGDFQNT

SEQ ID NO: 146563 - protein, 10 aa, synthetic construct
SWHRGDFQNT

SEQ ID NO: 146564 - protein, 10 aa, synthetic construct
SWIRGDFQNT

SEQ ID NO: 146565 - protein, 10 aa, synthetic construct
SWKRGDFQNT

SEQ ID NO: 146566 - protein, 10 aa, synthetic construct
SWLRGDFQNT

SEQ ID NO: 146567 - protein, 10 aa, synthetic construct
SWMRGDFQNT

SEQ ID NO: 146568 - protein, 10 aa, synthetic construct
SWPRGDFQNT

SEQ ID NO: 146569 - protein, 10 aa, synthetic construct
SWRRGDFQNT

SEQ ID NO: 146570 - protein, 10 aa, synthetic construct
SWVRGDFQNT

SEQ ID NO: 146571 - protein, 10 aa, synthetic construct
SWWRGDFQNT

SEQ ID NO: 146572 - protein, 10 aa, synthetic construct
SWYRGDFQNT

SEQ ID NO: 146573 - protein, 10 aa, synthetic construct
SYARGDFQNT

SEQ ID NO: 146574 - protein, 10 aa, synthetic construct
SYDRGDFQNT

SEQ ID NO: 146575 - protein, 10 aa, synthetic construct
SYERGDFQNT

SEQ ID NO: 146576 - protein, 10 aa, synthetic construct
SYNRGDFQNT

SEQ ID NO: 146577 - protein, 10 aa, synthetic construct
SYQRGDFQNT

SEQ ID NO: 146578 - protein, 10 aa, synthetic construct
SYSRGDFQNT

SEQ ID NO: 146579 - protein, 10 aa, synthetic construct
SYTRGDFQNT

SEQ ID NO: 146580 - protein, 10 aa, synthetic construct
SYFRGDFQNT

SEQ ID NO: 146581 - protein, 10 aa, synthetic construct
SYGRGDFQNT

SEQ ID NO: 146582 - protein, 10 aa, synthetic construct
SYHRGDFQNT

SEQ ID NO: 146583 - protein, 10 aa, synthetic construct
SYIRGDFQNT

SEQ ID NO: 146584 - protein, 10 aa, synthetic construct
SYKRGDFQNT

SEQ ID NO: 146585 - protein, 10 aa, synthetic construct
SYLRGDFQNT

SEQ ID NO: 146586 - protein, 10 aa, synthetic construct
SYMRGDFQNT

SEQ ID NO: 146587 - protein, 10 aa, synthetic construct
SYPRGDFQNT

SEQ ID NO: 146588 - protein, 10 aa, synthetic construct
SYRRGDFQNT

SEQ ID NO: 146589 - protein, 10 aa, synthetic construct
SYVRGDFQNT

SEQ ID NO: 146590 - protein, 10 aa, synthetic construct
SYWRGDFQNT

SEQ ID NO: 146591 - protein, 10 aa, synthetic construct
SYYRGDFQNT

SEQ ID NO: 146592 - protein, 10 aa, synthetic construct
TAARGDFQNT

SEQ ID NO: 146593 - protein, 10 aa, synthetic construct
TADRGDFQNT

SEQ ID NO: 146594 - protein, 10 aa, synthetic construct
TAERGDFQNT

SEQ ID NO: 146595 - protein, 10 aa, synthetic construct
TANRGDFQNT

SEQ ID NO: 146596 - protein, 10 aa, synthetic construct
TAQRGDFQNT

SEQ ID NO: 146597 - protein, 10 aa, synthetic construct
TASRGDFQNT

SEQ ID NO: 146598 - protein, 10 aa, synthetic construct
TATRGDFQNT

SEQ ID NO: 146599 - protein, 10 aa, synthetic construct
TAFRGDFQNT

SEQ ID NO: 146600 - protein, 10 aa, synthetic construct
TAGRGDFQNT

SEQ ID NO: 146601 - protein, 10 aa, synthetic construct
TAHRGDFQNT

SEQ ID NO: 146602 - protein, 10 aa, synthetic construct
TAIRGDFQNT

SEQ ID NO: 146603 - protein, 10 aa, synthetic construct
TAKRGDFQNT

SEQ ID NO: 146604 - protein, 10 aa, synthetic construct
TALRGDFQNT

SEQ ID NO: 146605 - protein, 10 aa, synthetic construct
TAMRGDFQNT

SEQ ID NO: 146606 - protein, 10 aa, synthetic construct
TAPRGDFQNT

SEQ ID NO: 146607 - protein, 10 aa, synthetic construct
TARRGDFQNT

SEQ ID NO: 146608 - protein, 10 aa, synthetic construct
TAVRGDFQNT

SEQ ID NO: 146609 - protein, 10 aa, synthetic construct
TAWRGDFQNT

SEQ ID NO: 146610 - protein, 10 aa, synthetic construct
TAYRGDFQNT

SEQ ID NO: 146611 - protein, 10 aa, synthetic construct
TDARGDFQNT

SEQ ID NO: 146612 - protein, 10 aa, synthetic construct
TDDRGDFQNT

SEQ ID NO: 146613 - protein, 10 aa, synthetic construct
TDERGDFQNT

SEQ ID NO: 146614 - protein, 10 aa, synthetic construct
TDNRGDFQNT

SEQ ID NO: 146615 - protein, 10 aa, synthetic construct
TDQRGDFQNT

SEQ ID NO: 146616 - protein, 10 aa, synthetic construct
TDSRGDFQNT

SEQ ID NO: 146617 - protein, 10 aa, synthetic construct
TDTRGDFQNT

SEQ ID NO: 146618 - protein, 10 aa, synthetic construct
TDFRGDFQNT

SEQ ID NO: 146619 - protein, 10 aa, synthetic construct
TDGRGDFQNT

SEQ ID NO: 146620 - protein, 10 aa, synthetic construct
TDHRGDFQNT

SEQ ID NO: 146621 - protein, 10 aa, synthetic construct
TDIRGDFQNT

SEQ ID NO: 146622 - protein, 10 aa, synthetic construct
TDKRGDFQNT

SEQ ID NO: 146623 - protein, 10 aa, synthetic construct
TDLRGDFQNT

SEQ ID NO: 146624 - protein, 10 aa, synthetic construct
TDMRGDFQNT

SEQ ID NO: 146625 - protein, 10 aa, synthetic construct
TDPRGDFQNT

SEQ ID NO: 146626 - protein, 10 aa, synthetic construct
TDRRGDFQNT

SEQ ID NO: 146627 - protein, 10 aa, synthetic construct
TDVRGDFQNT

SEQ ID NO: 146628 - protein, 10 aa, synthetic construct
TDWRGDFQNT

SEQ ID NO: 146629 - protein, 10 aa, synthetic construct
TDYRGDFQNT

SEQ ID NO: 146630 - protein, 10 aa, synthetic construct
TEARGDFQNT

SEQ ID NO: 146631 - protein, 10 aa, synthetic construct
TEDRGDFQNT

SEQ ID NO: 146632 - protein, 10 aa, synthetic construct
TEERGDFQNT

SEQ ID NO: 146633 - protein, 10 aa, synthetic construct
TENRGDFQNT

SEQ ID NO: 146634 - protein, 10 aa, synthetic construct
TEQRGDFQNT

SEQ ID NO: 146635 - protein, 10 aa, synthetic construct
TESRGDFQNT

SEQ ID NO: 146636 - protein, 10 aa, synthetic construct
TETRGDFQNT

SEQ ID NO: 146637 - protein, 10 aa, synthetic construct
TEFRGDFQNT

SEQ ID NO: 146638 - protein, 10 aa, synthetic construct
TEGRGDFQNT

SEQ ID NO: 146639 - protein, 10 aa, synthetic construct
TEHRGDFQNT

SEQ ID NO: 146640 - protein, 10 aa, synthetic construct
TEIRGDFQNT

SEQ ID NO: 146641 - protein, 10 aa, synthetic construct
TEKRGDFQNT

SEQ ID NO: 146642 - protein, 10 aa, synthetic construct
TELRGDFQNT

SEQ ID NO: 146643 - protein, 10 aa, synthetic construct
TEMRGDFQNT

SEQ ID NO: 146644 - protein, 10 aa, synthetic construct
TEPRGDFQNT

SEQ ID NO: 146645 - protein, 10 aa, synthetic construct
TERRGDFQNT

SEQ ID NO: 146646 - protein, 10 aa, synthetic construct
TEVRGDFQNT

SEQ ID NO: 146647 - protein, 10 aa, synthetic construct
TEWRGDFQNT

SEQ ID NO: 146648 - protein, 10 aa, synthetic construct
TEYRGDFQNT

SEQ ID NO: 146649 - protein, 10 aa, synthetic construct
TNARGDFQNT

SEQ ID NO: 146650 - protein, 10 aa, synthetic construct
TNDRGDFQNT

SEQ ID NO: 146651 - protein, 10 aa, synthetic construct
TNERGDFQNT

SEQ ID NO: 146652 - protein, 10 aa, synthetic construct
TNNRGDFQNT

SEQ ID NO: 146653 - protein, 10 aa, synthetic construct
TNQRGDFQNT

SEQ ID NO: 146654 - protein, 10 aa, synthetic construct
TNSRGDFQNT

SEQ ID NO: 146655 - protein, 10 aa, synthetic construct
TNTRGDFQNT

SEQ ID NO: 146656 - protein, 10 aa, synthetic construct
TNFRGDFQNT

SEQ ID NO: 146657 - protein, 10 aa, synthetic construct
TNGRGDFQNT

SEQ ID NO: 146658 - protein, 10 aa, synthetic construct
TNHRGDFQNT

SEQ ID NO: 146659 - protein, 10 aa, synthetic construct
TNIRGDFQNT

SEQ ID NO: 146660 - protein, 10 aa, synthetic construct
TNKRGDFQNT

SEQ ID NO: 146661 - protein, 10 aa, synthetic construct
TNLRGDFQNT

SEQ ID NO: 146662 - protein, 10 aa, synthetic construct
TNMRGDFQNT

SEQ ID NO: 146663 - protein, 10 aa, synthetic construct
TNPRGDFQNT

SEQ ID NO: 146664 - protein, 10 aa, synthetic construct
TNRRGDFQNT

SEQ ID NO: 146665 - protein, 10 aa, synthetic construct
TNVRGDFQNT

SEQ ID NO: 146666 - protein, 10 aa, synthetic construct
TNWRGDFQNT

SEQ ID NO: 146667 - protein, 10 aa, synthetic construct
TNYRGDFQNT

SEQ ID NO: 146668 - protein, 10 aa, synthetic construct
TQARGDFQNT

SEQ ID NO: 146669 - protein, 10 aa, synthetic construct
TQDRGDFQNT

SEQ ID NO: 146670 - protein, 10 aa, synthetic construct
TQERGDFQNT

SEQ ID NO: 146671 - protein, 10 aa, synthetic construct
TQNRGDFQNT

SEQ ID NO: 146672 - protein, 10 aa, synthetic construct
TQQRGDFQNT

SEQ ID NO: 146673 - protein, 10 aa, synthetic construct
TQSRGDFQNT

SEQ ID NO: 146674 - protein, 10 aa, synthetic construct
TQTRGDFQNT

SEQ ID NO: 146675 - protein, 10 aa, synthetic construct
TQFRGDFQNT

SEQ ID NO: 146676 - protein, 10 aa, synthetic construct
TQGRGDFQNT

SEQ ID NO: 146677 - protein, 10 aa, synthetic construct
TQHRGDFQNT

SEQ ID NO: 146678 - protein, 10 aa, synthetic construct
TQIRGDFQNT

SEQ ID NO: 146679 - protein, 10 aa, synthetic construct
TQKRGDFQNT

SEQ ID NO: 146680 - protein, 10 aa, synthetic construct
TQLRGDFQNT

SEQ ID NO: 146681 - protein, 10 aa, synthetic construct
TQMRGDFQNT

SEQ ID NO: 146682 - protein, 10 aa, synthetic construct
TQPRGDFQNT

SEQ ID NO: 146683 - protein, 10 aa, synthetic construct
TQRRGDFQNT

SEQ ID NO: 146684 - protein, 10 aa, synthetic construct
TQVRGDFQNT

SEQ ID NO: 146685 - protein, 10 aa, synthetic construct
TQWRGDFQNT

SEQ ID NO: 146686 - protein, 10 aa, synthetic construct
TQYRGDFQNT

SEQ ID NO: 146687 - protein, 10 aa, synthetic construct
TSARGDFQNT

SEQ ID NO: 146688 - protein, 10 aa, synthetic construct
TSDRGDFQNT

SEQ ID NO: 146689 - protein, 10 aa, synthetic construct
TSERGDFQNT

SEQ ID NO: 146690 - protein, 10 aa, synthetic construct
TSNRGDFQNT

SEQ ID NO: 146691 - protein, 10 aa, synthetic construct
TSQRGDFQNT

SEQ ID NO: 146692 - protein, 10 aa, synthetic construct
TSSRGDFQNT

SEQ ID NO: 146693 - protein, 10 aa, synthetic construct
TSTRGDFQNT

SEQ ID NO: 146694 - protein, 10 aa, synthetic construct
TSFRGDFQNT

SEQ ID NO: 146695 - protein, 10 aa, synthetic construct
TSGRGDFQNT

SEQ ID NO: 146696 - protein, 10 aa, synthetic construct
TSHRGDFQNT

SEQ ID NO: 146697 - protein, 10 aa, synthetic construct
TSIRGDFQNT

SEQ ID NO: 146698 - protein, 10 aa, synthetic construct
TSKRGDFQNT

SEQ ID NO: 146699 - protein, 10 aa, synthetic construct
TSLRGDFQNT

SEQ ID NO: 146700 - protein, 10 aa, synthetic construct
TSMRGDFQNT

SEQ ID NO: 146701 - protein, 10 aa, synthetic construct
TSPRGDFQNT

SEQ ID NO: 146702 - protein, 10 aa, synthetic construct
TSRRGDFQNT

SEQ ID NO: 146703 - protein, 10 aa, synthetic construct
TSVRGDFQNT

SEQ ID NO: 146704 - protein, 10 aa, synthetic construct
TSWRGDFQNT

SEQ ID NO: 146705 - protein, 10 aa, synthetic construct
TSYRGDFQNT

SEQ ID NO: 146706 - protein, 10 aa, synthetic construct
TTARGDFQNT

SEQ ID NO: 146707 - protein, 10 aa, synthetic construct
TTDRGDFQNT

SEQ ID NO: 146708 - protein, 10 aa, synthetic construct
TTERGDFQNT

SEQ ID NO: 146709 - protein, 10 aa, synthetic construct
TTNRGDFQNT

SEQ ID NO: 146710 - protein, 10 aa, synthetic construct
TTQRGDFQNT

SEQ ID NO: 146711 - protein, 10 aa, synthetic construct
TTSRGDFQNT

SEQ ID NO: 146712 - protein, 10 aa, synthetic construct
TTTRGDFQNT

SEQ ID NO: 146713 - protein, 10 aa, synthetic construct
TTFRGDFQNT

SEQ ID NO: 146714 - protein, 10 aa, synthetic construct
TTGRGDFQNT

SEQ ID NO: 146715 - protein, 10 aa, synthetic construct
TTHRGDFQNT

SEQ ID NO: 146716 - protein, 10 aa, synthetic construct
TTIRGDFQNT

SEQ ID NO: 146717 - protein, 10 aa, synthetic construct
TTKRGDFQNT

SEQ ID NO: 146718 - protein, 10 aa, synthetic construct
TTLRGDFQNT

SEQ ID NO: 146719 - protein, 10 aa, synthetic construct
TTMRGDFQNT

SEQ ID NO: 146720 - protein, 10 aa, synthetic construct
TTPRGDFQNT

SEQ ID NO: 146721 - protein, 10 aa, synthetic construct
TTRRGDFQNT

SEQ ID NO: 146722 - protein, 10 aa, synthetic construct
TTVRGDFQNT

SEQ ID NO: 146723 - protein, 10 aa, synthetic construct
TTWRGDFQNT

SEQ ID NO: 146724 - protein, 10 aa, synthetic construct
TTYRGDFQNT

SEQ ID NO: 146725 - protein, 10 aa, synthetic construct
TFARGDFQNT

SEQ ID NO: 146726 - protein, 10 aa, synthetic construct
TFDRGDFQNT

SEQ ID NO: 146727 - protein, 10 aa, synthetic construct
TFERGDFQNT

SEQ ID NO: 146728 - protein, 10 aa, synthetic construct
TFNRGDFQNT

SEQ ID NO: 146729 - protein, 10 aa, synthetic construct
TFQRGDFQNT

SEQ ID NO: 146730 - protein, 10 aa, synthetic construct
TFSRGDFQNT

SEQ ID NO: 146731 - protein, 10 aa, synthetic construct
TFTRGDFQNT

SEQ ID NO: 146732 - protein, 10 aa, synthetic construct
TFFRGDFQNT

SEQ ID NO: 146733 - protein, 10 aa, synthetic construct
TFGRGDFQNT

SEQ ID NO: 146734 - protein, 10 aa, synthetic construct
TFHRGDFQNT

SEQ ID NO: 146735 - protein, 10 aa, synthetic construct
TFIRGDFQNT

SEQ ID NO: 146736 - protein, 10 aa, synthetic construct
TFKRGDFQNT

SEQ ID NO: 146737 - protein, 10 aa, synthetic construct
TFLRGDFQNT

SEQ ID NO: 146738 - protein, 10 aa, synthetic construct
TFMRGDFQNT

SEQ ID NO: 146739 - protein, 10 aa, synthetic construct
TFPRGDFQNT

SEQ ID NO: 146740 - protein, 10 aa, synthetic construct
TFRRGDFQNT

SEQ ID NO: 146741 - protein, 10 aa, synthetic construct
TFVRGDFQNT

SEQ ID NO: 146742 - protein, 10 aa, synthetic construct
TFWRGDFQNT

SEQ ID NO: 146743 - protein, 10 aa, synthetic construct
TFYRGDFQNT

SEQ ID NO: 146744 - protein, 10 aa, synthetic construct
TGARGDFQNT

SEQ ID NO: 146745 - protein, 10 aa, synthetic construct
TGDRGDFQNT

SEQ ID NO: 146746 - protein, 10 aa, synthetic construct
TGERGDFQNT

SEQ ID NO: 146747 - protein, 10 aa, synthetic construct
TGNRGDFQNT

SEQ ID NO: 146748 - protein, 10 aa, synthetic construct
TGQRGDFQNT

SEQ ID NO: 146749 - protein, 10 aa, synthetic construct
TGSRGDFQNT

SEQ ID NO: 146750 - protein, 10 aa, synthetic construct
TGTRGDFQNT

SEQ ID NO: 146751 - protein, 10 aa, synthetic construct
TGFRGDFQNT

SEQ ID NO: 146752 - protein, 10 aa, synthetic construct
TGGRGDFQNT

SEQ ID NO: 146753 - protein, 10 aa, synthetic construct
TGHRGDFQNT

SEQ ID NO: 146754 - protein, 10 aa, synthetic construct
TGIRGDFQNT

SEQ ID NO: 146755 - protein, 10 aa, synthetic construct
TGKRGDFQNT

SEQ ID NO: 146756 - protein, 10 aa, synthetic construct
TGLRGDFQNT

SEQ ID NO: 146757 - protein, 10 aa, synthetic construct
TGMRGDFQNT

SEQ ID NO: 146758 - protein, 10 aa, synthetic construct
TGPRGDFQNT

SEQ ID NO: 146759 - protein, 10 aa, synthetic construct
TGRRGDFQNT

SEQ ID NO: 146760 - protein, 10 aa, synthetic construct
TGVRGDFQNT

SEQ ID NO: 146761 - protein, 10 aa, synthetic construct
TGWRGDFQNT

SEQ ID NO: 146762 - protein, 10 aa, synthetic construct
TGYRGDFQNT

SEQ ID NO: 146763 - protein, 10 aa, synthetic construct
THARGDFQNT

SEQ ID NO: 146764 - protein, 10 aa, synthetic construct
THDRGDFQNT

SEQ ID NO: 146765 - protein, 10 aa, synthetic construct
THERGDFQNT

SEQ ID NO: 146766 - protein, 10 aa, synthetic construct
THNRGDFQNT

SEQ ID NO: 146767 - protein, 10 aa, synthetic construct
THQRGDFQNT

SEQ ID NO: 146768 - protein, 10 aa, synthetic construct
THSRGDFQNT

SEQ ID NO: 146769 - protein, 10 aa, synthetic construct
THTRGDFQNT

SEQ ID NO: 146770 - protein, 10 aa, synthetic construct
THFRGDFQNT

SEQ ID NO: 146771 - protein, 10 aa, synthetic construct
THGRGDFQNT

SEQ ID NO: 146772 - protein, 10 aa, synthetic construct
THHRGDFQNT

SEQ ID NO: 146773 - protein, 10 aa, synthetic construct
THIRGDFQNT

SEQ ID NO: 146774 - protein, 10 aa, synthetic construct
THKRGDFQNT

SEQ ID NO: 146775 - protein, 10 aa, synthetic construct
THLRGDFQNT

SEQ ID NO: 146776 - protein, 10 aa, synthetic construct
THMRGDFQNT

SEQ ID NO: 146777 - protein, 10 aa, synthetic construct
THPRGDFQNT

SEQ ID NO: 146778 - protein, 10 aa, synthetic construct
THRRGDFQNT

SEQ ID NO: 146779 - protein, 10 aa, synthetic construct
THVRGDFQNT

SEQ ID NO: 146780 - protein, 10 aa, synthetic construct
THWRGDFQNT

SEQ ID NO: 146781 - protein, 10 aa, synthetic construct
THYRGDFQNT

SEQ ID NO: 146782 - protein, 10 aa, synthetic construct
TIARGDFQNT

SEQ ID NO: 146783 - protein, 10 aa, synthetic construct
TIDRGDFQNT

SEQ ID NO: 146784 - protein, 10 aa, synthetic construct
TIERGDFQNT

SEQ ID NO: 146785 - protein, 10 aa, synthetic construct
TINRGDFQNT

SEQ ID NO: 146786 - protein, 10 aa, synthetic construct
TIQRGDFQNT

SEQ ID NO: 146787 - protein, 10 aa, synthetic construct
TISRGDFQNT

SEQ ID NO: 146788 - protein, 10 aa, synthetic construct
TITRGDFQNT

SEQ ID NO: 146789 - protein, 10 aa, synthetic construct
TIFRGDFQNT

SEQ ID NO: 146790 - protein, 10 aa, synthetic construct
TIGRGDFQNT

SEQ ID NO: 146791 - protein, 10 aa, synthetic construct
TIHRGDFQNT

SEQ ID NO: 146792 - protein, 10 aa, synthetic construct
TIIRGDFQNT

SEQ ID NO: 146793 - protein, 10 aa, synthetic construct
TIKRGDFQNT

SEQ ID NO: 146794 - protein, 10 aa, synthetic construct
TILRGDFQNT

SEQ ID NO: 146795 - protein, 10 aa, synthetic construct
TIMRGDFQNT

SEQ ID NO: 146796 - protein, 10 aa, synthetic construct
TIPRGDFQNT

SEQ ID NO: 146797 - protein, 10 aa, synthetic construct
TIRRGDFQNT

SEQ ID NO: 146798 - protein, 10 aa, synthetic construct
TIVRGDFQNT

SEQ ID NO: 146799 - protein, 10 aa, synthetic construct
TIWRGDFQNT

SEQ ID NO: 146800 - protein, 10 aa, synthetic construct
TIYRGDFQNT

SEQ ID NO: 146801 - protein, 10 aa, synthetic construct
TKARGDFQNT

SEQ ID NO: 146802 - protein, 10 aa, synthetic construct
TKDRGDFQNT

SEQ ID NO: 146803 - protein, 10 aa, synthetic construct
TKERGDFQNT

SEQ ID NO: 146804 - protein, 10 aa, synthetic construct
TKNRGDFQNT

SEQ ID NO: 146805 - protein, 10 aa, synthetic construct
TKQRGDFQNT

SEQ ID NO: 146806 - protein, 10 aa, synthetic construct
TKSRGDFQNT

SEQ ID NO: 146807 - protein, 10 aa, synthetic construct
TKTRGDFQNT

SEQ ID NO: 146808 - protein, 10 aa, synthetic construct
TKFRGDFQNT

SEQ ID NO: 146809 - protein, 10 aa, synthetic construct
TKGRGDFQNT

SEQ ID NO: 146810 - protein, 10 aa, synthetic construct
TKHRGDFQNT

SEQ ID NO: 146811 - protein, 10 aa, synthetic construct
TKIRGDFQNT

SEQ ID NO: 146812 - protein, 10 aa, synthetic construct
TKKRGDFQNT

SEQ ID NO: 146813 - protein, 10 aa, synthetic construct
TKLRGDFQNT

SEQ ID NO: 146814 - protein, 10 aa, synthetic construct
TKMRGDFQNT

SEQ ID NO: 146815 - protein, 10 aa, synthetic construct
TKPRGDFQNT

SEQ ID NO: 146816 - protein, 10 aa, synthetic construct
TKRRGDFQNT

SEQ ID NO: 146817 - protein, 10 aa, synthetic construct
TKVRGDFQNT

SEQ ID NO: 146818 - protein, 10 aa, synthetic construct
TKWRGDFQNT

SEQ ID NO: 146819 - protein, 10 aa, synthetic construct
TKYRGDFQNT

SEQ ID NO: 146820 - protein, 10 aa, synthetic construct
TLARGDFQNT

SEQ ID NO: 146821 - protein, 10 aa, synthetic construct
TLDRGDFQNT

SEQ ID NO: 146822 - protein, 10 aa, synthetic construct
TLERGDFQNT

SEQ ID NO: 146823 - protein, 10 aa, synthetic construct
TLNRGDFQNT

SEQ ID NO: 146824 - protein, 10 aa, synthetic construct
TLQRGDFQNT

SEQ ID NO: 146825 - protein, 10 aa, synthetic construct
TLSRGDFQNT

SEQ ID NO: 146826 - protein, 10 aa, synthetic construct
TLTRGDFQNT

SEQ ID NO: 146827 - protein, 10 aa, synthetic construct
TLFRGDFQNT

SEQ ID NO: 146828 - protein, 10 aa, synthetic construct
TLGRGDFQNT

SEQ ID NO: 146829 - protein, 10 aa, synthetic construct
TLHRGDFQNT

SEQ ID NO: 146830 - protein, 10 aa, synthetic construct
TLIRGDFQNT

SEQ ID NO: 146831 - protein, 10 aa, synthetic construct
TLKRGDFQNT

SEQ ID NO: 146832 - protein, 10 aa, synthetic construct
TLLRGDFQNT

SEQ ID NO: 146833 - protein, 10 aa, synthetic construct
TLMRGDFQNT

SEQ ID NO: 146834 - protein, 10 aa, synthetic construct
TLPRGDFQNT

SEQ ID NO: 146835 - protein, 10 aa, synthetic construct
TLRRGDFQNT

SEQ ID NO: 146836 - protein, 10 aa, synthetic construct
TLVRGDFQNT

SEQ ID NO: 146837 - protein, 10 aa, synthetic construct
TLWRGDFQNT

SEQ ID NO: 146838 - protein, 10 aa, synthetic construct
TLYRGDFQNT

SEQ ID NO: 146839 - protein, 10 aa, synthetic construct
TMARGDFQNT

SEQ ID NO: 146840 - protein, 10 aa, synthetic construct
TMDRGDFQNT

SEQ ID NO: 146841 - protein, 10 aa, synthetic construct
TMERGDFQNT

SEQ ID NO: 146842 - protein, 10 aa, synthetic construct
TMNRGDFQNT

SEQ ID NO: 146843 - protein, 10 aa, synthetic construct
TMQRGDFQNT

SEQ ID NO: 146844 - protein, 10 aa, synthetic construct
TMSRGDFQNT

SEQ ID NO: 146845 - protein, 10 aa, synthetic construct
TMTRGDFQNT

SEQ ID NO: 146846 - protein, 10 aa, synthetic construct
TMFRGDFQNT

SEQ ID NO: 146847 - protein, 10 aa, synthetic construct
TMGRGDFQNT

SEQ ID NO: 146848 - protein, 10 aa, synthetic construct
TMHRGDFQNT

SEQ ID NO: 146849 - protein, 10 aa, synthetic construct
TMIRGDFQNT

SEQ ID NO: 146850 - protein, 10 aa, synthetic construct
TMKRGDFQNT

SEQ ID NO: 146851 - protein, 10 aa, synthetic construct
TMLRGDFQNT

SEQ ID NO: 146852 - protein, 10 aa, synthetic construct
TMMRGDFQNT

SEQ ID NO: 146853 - protein, 10 aa, synthetic construct
TMPRGDFQNT

SEQ ID NO: 146854 - protein, 10 aa, synthetic construct
TMRRGDFQNT

SEQ ID NO: 146855 - protein, 10 aa, synthetic construct
TMVRGDFQNT

SEQ ID NO: 146856 - protein, 10 aa, synthetic construct
TMWRGDFQNT

SEQ ID NO: 146857 - protein, 10 aa, synthetic construct
TMYRGDFQNT

SEQ ID NO: 146858 - protein, 10 aa, synthetic construct
TPARGDFQNT

SEQ ID NO: 146859 - protein, 10 aa, synthetic construct
TPDRGDFQNT

SEQ ID NO: 146860 - protein, 10 aa, synthetic construct
TPERGDFQNT

SEQ ID NO: 146861 - protein, 10 aa, synthetic construct
TPNRGDFQNT

SEQ ID NO: 146862 - protein, 10 aa, synthetic construct
TPQRGDFQNT

SEQ ID NO: 146863 - protein, 10 aa, synthetic construct
TPSRGDFQNT

SEQ ID NO: 146864 - protein, 10 aa, synthetic construct
TPTRGDFQNT

SEQ ID NO: 146865 - protein, 10 aa, synthetic construct
TPFRGDFQNT

SEQ ID NO: 146866 - protein, 10 aa, synthetic construct
TPGRGDFQNT

SEQ ID NO: 146867 - protein, 10 aa, synthetic construct
TPHRGDFQNT

SEQ ID NO: 146868 - protein, 10 aa, synthetic construct
TPIRGDFQNT

SEQ ID NO: 146869 - protein, 10 aa, synthetic construct
TPKRGDFQNT

SEQ ID NO: 146870 - protein, 10 aa, synthetic construct
TPLRGDFQNT

SEQ ID NO: 146871 - protein, 10 aa, synthetic construct
TPMRGDFQNT

SEQ ID NO: 146872 - protein, 10 aa, synthetic construct
TPPRGDFQNT

SEQ ID NO: 146873 - protein, 10 aa, synthetic construct
TPRRGDFQNT

SEQ ID NO: 146874 - protein, 10 aa, synthetic construct
TPVRGDFQNT

SEQ ID NO: 146875 - protein, 10 aa, synthetic construct
TPWRGDFQNT

SEQ ID NO: 146876 - protein, 10 aa, synthetic construct
TPYRGDFQNT

SEQ ID NO: 146877 - protein, 10 aa, synthetic construct
TRARGDFQNT

SEQ ID NO: 146878 - protein, 10 aa, synthetic construct
TRDRGDFQNT

SEQ ID NO: 146879 - protein, 10 aa, synthetic construct
TRERGDFQNT

SEQ ID NO: 146880 - protein, 10 aa, synthetic construct
TRNRGDFQNT

SEQ ID NO: 146881 - protein, 10 aa, synthetic construct
TRQRGDFQNT

SEQ ID NO: 146882 - protein, 10 aa, synthetic construct
TRSRGDFQNT

SEQ ID NO: 146883 - protein, 10 aa, synthetic construct
TRTRGDFQNT

SEQ ID NO: 146884 - protein, 10 aa, synthetic construct
TRFRGDFQNT

SEQ ID NO: 146885 - protein, 10 aa, synthetic construct
TRGRGDFQNT

SEQ ID NO: 146886 - protein, 10 aa, synthetic construct
TRHRGDFQNT

SEQ ID NO: 146887 - protein, 10 aa, synthetic construct
TRIRGDFQNT

SEQ ID NO: 146888 - protein, 10 aa, synthetic construct
TRKRGDFQNT

SEQ ID NO: 146889 - protein, 10 aa, synthetic construct
TRLRGDFQNT

SEQ ID NO: 146890 - protein, 10 aa, synthetic construct
TRMRGDFQNT

SEQ ID NO: 146891 - protein, 10 aa, synthetic construct
TRPRGDFQNT

SEQ ID NO: 146892 - protein, 10 aa, synthetic construct
TRRRGDFQNT

SEQ ID NO: 146893 - protein, 10 aa, synthetic construct
TRVRGDFQNT

SEQ ID NO: 146894 - protein, 10 aa, synthetic construct
TRWRGDFQNT

SEQ ID NO: 146895 - protein, 10 aa, synthetic construct
TRYRGDFQNT

SEQ ID NO: 146896 - protein, 10 aa, synthetic construct
TVARGDFQNT

SEQ ID NO: 146897 - protein, 10 aa, synthetic construct
TVDRGDFQNT

SEQ ID NO: 146898 - protein, 10 aa, synthetic construct
TVERGDFQNT

SEQ ID NO: 146899 - protein, 10 aa, synthetic construct
TVNRGDFQNT

SEQ ID NO: 146900 - protein, 10 aa, synthetic construct
TVQRGDFQNT

SEQ ID NO: 146901 - protein, 10 aa, synthetic construct
TVSRGDFQNT

SEQ ID NO: 146902 - protein, 10 aa, synthetic construct
TVTRGDFQNT

SEQ ID NO: 146903 - protein, 10 aa, synthetic construct
TVFRGDFQNT

SEQ ID NO: 146904 - protein, 10 aa, synthetic construct
TVGRGDFQNT

SEQ ID NO: 146905 - protein, 10 aa, synthetic construct
TVHRGDFQNT

SEQ ID NO: 146906 - protein, 10 aa, synthetic construct
TVIRGDFQNT

SEQ ID NO: 146907 - protein, 10 aa, synthetic construct
TVKRGDFQNT

SEQ ID NO: 146908 - protein, 10 aa, synthetic construct
TVLRGDFQNT

SEQ ID NO: 146909 - protein, 10 aa, synthetic construct
TVMRGDFQNT

SEQ ID NO: 146910 - protein, 10 aa, synthetic construct
TVPRGDFQNT

SEQ ID NO: 146911 - protein, 10 aa, synthetic construct
TVRRGDFQNT

SEQ ID NO: 146912 - protein, 10 aa, synthetic construct
TVVRGDFQNT

SEQ ID NO: 146913 - protein, 10 aa, synthetic construct
TVWRGDFQNT

SEQ ID NO: 146914 - protein, 10 aa, synthetic construct
TVYRGDFQNT

SEQ ID NO: 146915 - protein, 10 aa, synthetic construct
TWARGDFQNT

SEQ ID NO: 146916 - protein, 10 aa, synthetic construct
TWDRGDFQNT

SEQ ID NO: 146917 - protein, 10 aa, synthetic construct
TWERGDFQNT

SEQ ID NO: 146918 - protein, 10 aa, synthetic construct
TWNRGDFQNT

SEQ ID NO: 146919 - protein, 10 aa, synthetic construct
TWQRGDFQNT

SEQ ID NO: 146920 - protein, 10 aa, synthetic construct
TWSRGDFQNT

SEQ ID NO: 146921 - protein, 10 aa, synthetic construct
TWTRGDFQNT

SEQ ID NO: 146922 - protein, 10 aa, synthetic construct
TWFRGDFQNT

SEQ ID NO: 146923 - protein, 10 aa, synthetic construct
TWGRGDFQNT

SEQ ID NO: 146924 - protein, 10 aa, synthetic construct
TWHRGDFQNT

SEQ ID NO: 146925 - protein, 10 aa, synthetic construct
TWIRGDFQNT

SEQ ID NO: 146926 - protein, 10 aa, synthetic construct
TWKRGDFQNT

SEQ ID NO: 146927 - protein, 10 aa, synthetic construct
TWLRGDFQNT

SEQ ID NO: 146928 - protein, 10 aa, synthetic construct
TWMRGDFQNT

SEQ ID NO: 146929 - protein, 10 aa, synthetic construct
TWPRGDFQNT

SEQ ID NO: 146930 - protein, 10 aa, synthetic construct
TWRRGDFQNT

SEQ ID NO: 146931 - protein, 10 aa, synthetic construct
TWVRGDFQNT

SEQ ID NO: 146932 - protein, 10 aa, synthetic construct
TWWRGDFQNT

SEQ ID NO: 146933 - protein, 10 aa, synthetic construct
TWYRGDFQNT

SEQ ID NO: 146934 - protein, 10 aa, synthetic construct
TYARGDFQNT

SEQ ID NO: 146935 - protein, 10 aa, synthetic construct
TYDRGDFQNT

SEQ ID NO: 146936 - protein, 10 aa, synthetic construct
TYERGDFQNT

SEQ ID NO: 146937 - protein, 10 aa, synthetic construct
TYNRGDFQNT

SEQ ID NO: 146938 - protein, 10 aa, synthetic construct
TYQRGDFQNT

SEQ ID NO: 146939 - protein, 10 aa, synthetic construct
TYSRGDFQNT

SEQ ID NO: 146940 - protein, 10 aa, synthetic construct
TYTRGDFQNT

SEQ ID NO: 146941 - protein, 10 aa, synthetic construct
TYFRGDFQNT

SEQ ID NO: 146942 - protein, 10 aa, synthetic construct
TYGRGDFQNT

SEQ ID NO: 146943 - protein, 10 aa, synthetic construct
TYHRGDFQNT

SEQ ID NO: 146944 - protein, 10 aa, synthetic construct
TYIRGDFQNT

SEQ ID NO: 146945 - protein, 10 aa, synthetic construct
TYKRGDFQNT

SEQ ID NO: 146946 - protein, 10 aa, synthetic construct
TYLRGDFQNT

SEQ ID NO: 146947 - protein, 10 aa, synthetic construct
TYMRGDFQNT

SEQ ID NO: 146948 - protein, 10 aa, synthetic construct
TYPRGDFQNT

SEQ ID NO: 146949 - protein, 10 aa, synthetic construct
TYRRGDFQNT

SEQ ID NO: 146950 - protein, 10 aa, synthetic construct
TYVRGDFQNT

SEQ ID NO: 146951 - protein, 10 aa, synthetic construct
TYWRGDFQNT

SEQ ID NO: 146952 - protein, 10 aa, synthetic construct
TYYRGDFQNT

SEQ ID NO: 146953 - protein, 10 aa, synthetic construct
AAARGDFNNT

SEQ ID NO: 146954 - protein, 10 aa, synthetic construct
AADRGDFNNT

SEQ ID NO: 146955 - protein, 10 aa, synthetic construct
AAERGDFNNT

SEQ ID NO: 146956 - protein, 10 aa, synthetic construct
AANRGDFNNT

SEQ ID NO: 146957 - protein, 10 aa, synthetic construct
AAQRGDFNNT

SEQ ID NO: 146958 - protein, 10 aa, synthetic construct
AASRGDFNNT

SEQ ID NO: 146959 - protein, 10 aa, synthetic construct
AATRGDFNNT

SEQ ID NO: 146960 - protein, 10 aa, synthetic construct
AAFRGDFNNT

SEQ ID NO: 146961 - protein, 10 aa, synthetic construct
AAGRGDFNNT

SEQ ID NO: 146962 - protein, 10 aa, synthetic construct
AAHRGDFNNT

SEQ ID NO: 146963 - protein, 10 aa, synthetic construct
AAIRGDFNNT

SEQ ID NO: 146964 - protein, 10 aa, synthetic construct
AAKRGDFNNT

SEQ ID NO: 146965 - protein, 10 aa, synthetic construct
AALRGDFNNT

SEQ ID NO: 146966 - protein, 10 aa, synthetic construct
AAMRGDFNNT

SEQ ID NO: 146967 - protein, 10 aa, synthetic construct
AAPRGDFNNT

SEQ ID NO: 146968 - protein, 10 aa, synthetic construct
AARRGDFNNT

SEQ ID NO: 146969 - protein, 10 aa, synthetic construct
AAVRGDFNNT

SEQ ID NO: 146970 - protein, 10 aa, synthetic construct
AAWRGDFNNT

SEQ ID NO: 146971 - protein, 10 aa, synthetic construct
AAYRGDFNNT

SEQ ID NO: 146972 - protein, 10 aa, synthetic construct
ADARGDFNNT

SEQ ID NO: 146973 - protein, 10 aa, synthetic construct
ADDRGDFNNT

SEQ ID NO: 146974 - protein, 10 aa, synthetic construct
ADERGDFNNT

SEQ ID NO: 146975 - protein, 10 aa, synthetic construct
ADNRGDFNNT

SEQ ID NO: 146976 - protein, 10 aa, synthetic construct
ADQRGDFNNT

SEQ ID NO: 146977 - protein, 10 aa, synthetic construct
ADSRGDFNNT

SEQ ID NO: 146978 - protein, 10 aa, synthetic construct
ADTRGDFNNT

SEQ ID NO: 146979 - protein, 10 aa, synthetic construct
ADFRGDFNNT

SEQ ID NO: 146980 - protein, 10 aa, synthetic construct
ADGRGDFNNT

SEQ ID NO: 146981 - protein, 10 aa, synthetic construct
ADHRGDFNNT

SEQ ID NO: 146982 - protein, 10 aa, synthetic construct
ADIRGDFNNT

SEQ ID NO: 146983 - protein, 10 aa, synthetic construct
ADKRGDFNNT

SEQ ID NO: 146984 - protein, 10 aa, synthetic construct
ADLRGDFNNT

SEQ ID NO: 146985 - protein, 10 aa, synthetic construct
ADMRGDFNNT

SEQ ID NO: 146986 - protein, 10 aa, synthetic construct
ADPRGDFNNT

SEQ ID NO: 146987 - protein, 10 aa, synthetic construct
ADRRGDFNNT

SEQ ID NO: 146988 - protein, 10 aa, synthetic construct
ADVRGDFNNT

SEQ ID NO: 146989 - protein, 10 aa, synthetic construct
ADWRGDFNNT

SEQ ID NO: 146990 - protein, 10 aa, synthetic construct
ADYRGDFNNT

SEQ ID NO: 146991 - protein, 10 aa, synthetic construct
AEARGDFNNT

SEQ ID NO: 146992 - protein, 10 aa, synthetic construct
AEDRGDFNNT

SEQ ID NO: 146993 - protein, 10 aa, synthetic construct
AEERGDFNNT

SEQ ID NO: 146994 - protein, 10 aa, synthetic construct
AENRGDFNNT

SEQ ID NO: 146995 - protein, 10 aa, synthetic construct
AEQRGDFNNT

SEQ ID NO: 146996 - protein, 10 aa, synthetic construct
AESRGDFNNT

SEQ ID NO: 146997 - protein, 10 aa, synthetic construct
AETRGDFNNT

SEQ ID NO: 146998 - protein, 10 aa, synthetic construct
AEFRGDFNNT

SEQ ID NO: 146999 - protein, 10 aa, synthetic construct
AEGRGDFNNT

SEQ ID NO: 147000 - protein, 10 aa, synthetic construct
AEHRGDFNNT

SEQ ID NO: 147001 - protein, 10 aa, synthetic construct
AEIRGDFNNT

SEQ ID NO: 147002 - protein, 10 aa, synthetic construct
AEKRGDFNNT

SEQ ID NO: 147003 - protein, 10 aa, synthetic construct
AELRGDFNNT

SEQ ID NO: 147004 - protein, 10 aa, synthetic construct
AEMRGDFNNT

SEQ ID NO: 147005 - protein, 10 aa, synthetic construct
AEPRGDFNNT

SEQ ID NO: 147006 - protein, 10 aa, synthetic construct
AERRGDFNNT

SEQ ID NO: 147007 - protein, 10 aa, synthetic construct
AEVRGDFNNT

SEQ ID NO: 147008 - protein, 10 aa, synthetic construct
AEWRGDFNNT

SEQ ID NO: 147009 - protein, 10 aa, synthetic construct
AEYRGDFNNT

SEQ ID NO: 147010 - protein, 10 aa, synthetic construct
ANARGDFNNT

SEQ ID NO: 147011 - protein, 10 aa, synthetic construct
ANDRGDFNNT

SEQ ID NO: 147012 - protein, 10 aa, synthetic construct
ANERGDFNNT

SEQ ID NO: 147013 - protein, 10 aa, synthetic construct
ANNRGDFNNT

SEQ ID NO: 147014 - protein, 10 aa, synthetic construct
ANQRGDFNNT

SEQ ID NO: 147015 - protein, 10 aa, synthetic construct
ANSRGDFNNT

SEQ ID NO: 147016 - protein, 10 aa, synthetic construct
ANTRGDFNNT

SEQ ID NO: 147017 - protein, 10 aa, synthetic construct
ANFRGDFNNT

SEQ ID NO: 147018 - protein, 10 aa, synthetic construct
ANGRGDFNNT

SEQ ID NO: 147019 - protein, 10 aa, synthetic construct
ANHRGDFNNT

SEQ ID NO: 147020 - protein, 10 aa, synthetic construct
ANIRGDFNNT

SEQ ID NO: 147021 - protein, 10 aa, synthetic construct
ANKRGDFNNT

SEQ ID NO: 147022 - protein, 10 aa, synthetic construct
ANLRGDFNNT

SEQ ID NO: 147023 - protein, 10 aa, synthetic construct
ANMRGDFNNT

SEQ ID NO: 147024 - protein, 10 aa, synthetic construct
ANPRGDFNNT

SEQ ID NO: 147025 - protein, 10 aa, synthetic construct
ANRRGDFNNT

SEQ ID NO: 147026 - protein, 10 aa, synthetic construct
ANVRGDFNNT

SEQ ID NO: 147027 - protein, 10 aa, synthetic construct
ANWRGDFNNT

SEQ ID NO: 147028 - protein, 10 aa, synthetic construct
ANYRGDFNNT

SEQ ID NO: 147029 - protein, 10 aa, synthetic construct
AQARGDFNNT

SEQ ID NO: 147030 - protein, 10 aa, synthetic construct
AQDRGDFNNT

SEQ ID NO: 147031 - protein, 10 aa, synthetic construct
AQERGDFNNT

SEQ ID NO: 147032 - protein, 10 aa, synthetic construct
AQNRGDFNNT

SEQ ID NO: 147033 - protein, 10 aa, synthetic construct
AQQRGDFNNT

SEQ ID NO: 147034 - protein, 10 aa, synthetic construct
AQSRGDFNNT

SEQ ID NO: 147035 - protein, 10 aa, synthetic construct
AQTRGDFNNT

SEQ ID NO: 147036 - protein, 10 aa, synthetic construct
AQFRGDFNNT

SEQ ID NO: 147037 - protein, 10 aa, synthetic construct
AQGRGDFNNT

SEQ ID NO: 147038 - protein, 10 aa, synthetic construct
AQHRGDFNNT

SEQ ID NO: 147039 - protein, 10 aa, synthetic construct
AQIRGDFNNT

SEQ ID NO: 147040 - protein, 10 aa, synthetic construct
AQKRGDFNNT

SEQ ID NO: 147041 - protein, 10 aa, synthetic construct
AQLRGDFNNT

SEQ ID NO: 147042 - protein, 10 aa, synthetic construct
AQMRGDFNNT

SEQ ID NO: 147043 - protein, 10 aa, synthetic construct
AQPRGDFNNT

SEQ ID NO: 147044 - protein, 10 aa, synthetic construct
AQRRGDFNNT

SEQ ID NO: 147045 - protein, 10 aa, synthetic construct
AQVRGDFNNT

SEQ ID NO: 147046 - protein, 10 aa, synthetic construct
AQWRGDFNNT

SEQ ID NO: 147047 - protein, 10 aa, synthetic construct
AQYRGDFNNT

SEQ ID NO: 147048 - protein, 10 aa, synthetic construct
ASARGDFNNT

SEQ ID NO: 147049 - protein, 10 aa, synthetic construct
ASDRGDFNNT

SEQ ID NO: 147050 - protein, 10 aa, synthetic construct
ASERGDFNNT

SEQ ID NO: 147051 - protein, 10 aa, synthetic construct
ASNRGDFNNT

SEQ ID NO: 147052 - protein, 10 aa, synthetic construct
ASQRGDFNNT

SEQ ID NO: 147053 - protein, 10 aa, synthetic construct
ASSRGDFNNT

SEQ ID NO: 147054 - protein, 10 aa, synthetic construct
ASTRGDFNNT

SEQ ID NO: 147055 - protein, 10 aa, synthetic construct
ASFRGDFNNT

SEQ ID NO: 147056 - protein, 10 aa, synthetic construct
ASGRGDFNNT

SEQ ID NO: 147057 - protein, 10 aa, synthetic construct
ASHRGDFNNT

SEQ ID NO: 147058 - protein, 10 aa, synthetic construct
ASIRGDFNNT

SEQ ID NO: 147059 - protein, 10 aa, synthetic construct
ASKRGDFNNT

SEQ ID NO: 147060 - protein, 10 aa, synthetic construct
ASLRGDFNNT

SEQ ID NO: 147061 - protein, 10 aa, synthetic construct
ASMRGDFNNT

SEQ ID NO: 147062 - protein, 10 aa, synthetic construct
ASPRGDFNNT

SEQ ID NO: 147063 - protein, 10 aa, synthetic construct
ASRRGDFNNT

SEQ ID NO: 147064 - protein, 10 aa, synthetic construct
ASVRGDFNNT

SEQ ID NO: 147065 - protein, 10 aa, synthetic construct
ASWRGDFNNT

SEQ ID NO: 147066 - protein, 10 aa, synthetic construct
ASYRGDFNNT

SEQ ID NO: 147067 - protein, 10 aa, synthetic construct
ATARGDFNNT

SEQ ID NO: 147068 - protein, 10 aa, synthetic construct
ATDRGDFNNT

SEQ ID NO: 147069 - protein, 10 aa, synthetic construct
ATERGDFNNT

SEQ ID NO: 147070 - protein, 10 aa, synthetic construct
ATNRGDFNNT

SEQ ID NO: 147071 - protein, 10 aa, synthetic construct
ATQRGDFNNT

SEQ ID NO: 147072 - protein, 10 aa, synthetic construct
ATSRGDFNNT

SEQ ID NO: 147073 - protein, 10 aa, synthetic construct
ATTRGDFNNT

SEQ ID NO: 147074 - protein, 10 aa, synthetic construct
ATFRGDFNNT

SEQ ID NO: 147075 - protein, 10 aa, synthetic construct
ATGRGDFNNT

SEQ ID NO: 147076 - protein, 10 aa, synthetic construct
ATHRGDFNNT

SEQ ID NO: 147077 - protein, 10 aa, synthetic construct
ATIRGDFNNT

SEQ ID NO: 147078 - protein, 10 aa, synthetic construct
ATKRGDFNNT

SEQ ID NO: 147079 - protein, 10 aa, synthetic construct
ATLRGDFNNT

SEQ ID NO: 147080 - protein, 10 aa, synthetic construct
ATMRGDFNNT

SEQ ID NO: 147081 - protein, 10 aa, synthetic construct
ATPRGDFNNT

SEQ ID NO: 147082 - protein, 10 aa, synthetic construct
ATRRGDFNNT

SEQ ID NO: 147083 - protein, 10 aa, synthetic construct
ATVRGDFNNT

SEQ ID NO: 147084 - protein, 10 aa, synthetic construct
ATWRGDFNNT

SEQ ID NO: 147085 - protein, 10 aa, synthetic construct
ATYRGDFNNT

SEQ ID NO: 147086 - protein, 10 aa, synthetic construct
AFARGDFNNT

SEQ ID NO: 147087 - protein, 10 aa, synthetic construct
AFDRGDFNNT

SEQ ID NO: 147088 - protein, 10 aa, synthetic construct
AFERGDFNNT

SEQ ID NO: 147089 - protein, 10 aa, synthetic construct
AFNRGDFNNT

SEQ ID NO: 147090 - protein, 10 aa, synthetic construct
AFQRGDFNNT

SEQ ID NO: 147091 - protein, 10 aa, synthetic construct
AFSRGDFNNT

SEQ ID NO: 147092 - protein, 10 aa, synthetic construct
AFTRGDFNNT

SEQ ID NO: 147093 - protein, 10 aa, synthetic construct
AFFRGDFNNT

SEQ ID NO: 147094 - protein, 10 aa, synthetic construct
AFGRGDFNNT

SEQ ID NO: 147095 - protein, 10 aa, synthetic construct
AFHRGDFNNT

SEQ ID NO: 147096 - protein, 10 aa, synthetic construct
AFIRGDFNNT

SEQ ID NO: 147097 - protein, 10 aa, synthetic construct
AFKRGDFNNT

SEQ ID NO: 147098 - protein, 10 aa, synthetic construct
AFLRGDFNNT

SEQ ID NO: 147099 - protein, 10 aa, synthetic construct
AFMRGDFNNT

SEQ ID NO: 147100 - protein, 10 aa, synthetic construct
AFPRGDFNNT

SEQ ID NO: 147101 - protein, 10 aa, synthetic construct
AFRRGDFNNT

SEQ ID NO: 147102 - protein, 10 aa, synthetic construct
AFVRGDFNNT

SEQ ID NO: 147103 - protein, 10 aa, synthetic construct
AFWRGDFNNT

SEQ ID NO: 147104 - protein, 10 aa, synthetic construct
AFYRGDFNNT

SEQ ID NO: 147105 - protein, 10 aa, synthetic construct
AGARGDFNNT

SEQ ID NO: 147106 - protein, 10 aa, synthetic construct
AGDRGDFNNT

SEQ ID NO: 147107 - protein, 10 aa, synthetic construct
AGERGDFNNT

SEQ ID NO: 147108 - protein, 10 aa, synthetic construct
AGNRGDFNNT

SEQ ID NO: 147109 - protein, 10 aa, synthetic construct
AGQRGDFNNT

SEQ ID NO: 147110 - protein, 10 aa, synthetic construct
AGSRGDFNNT

SEQ ID NO: 147111 - protein, 10 aa, synthetic construct
AGTRGDFNNT

SEQ ID NO: 147112 - protein, 10 aa, synthetic construct
AGFRGDFNNT

SEQ ID NO: 147113 - protein, 10 aa, synthetic construct
AGGRGDFNNT

SEQ ID NO: 147114 - protein, 10 aa, synthetic construct
AGHRGDFNNT

SEQ ID NO: 147115 - protein, 10 aa, synthetic construct
AGIRGDFNNT

SEQ ID NO: 147116 - protein, 10 aa, synthetic construct
AGKRGDFNNT

SEQ ID NO: 147117 - protein, 10 aa, synthetic construct
AGLRGDFNNT

SEQ ID NO: 147118 - protein, 10 aa, synthetic construct
AGMRGDFNNT

SEQ ID NO: 147119 - protein, 10 aa, synthetic construct
AGPRGDFNNT

SEQ ID NO: 147120 - protein, 10 aa, synthetic construct
AGRRGDFNNT

SEQ ID NO: 147121 - protein, 10 aa, synthetic construct
AGVRGDFNNT

SEQ ID NO: 147122 - protein, 10 aa, synthetic construct
AGWRGDFNNT

SEQ ID NO: 147123 - protein, 10 aa, synthetic construct
AGYRGDFNNT

SEQ ID NO: 147124 - protein, 10 aa, synthetic construct
AHARGDFNNT

SEQ ID NO: 147125 - protein, 10 aa, synthetic construct
AHDRGDFNNT

SEQ ID NO: 147126 - protein, 10 aa, synthetic construct
AHERGDFNNT

SEQ ID NO: 147127 - protein, 10 aa, synthetic construct
AHNRGDFNNT

SEQ ID NO: 147128 - protein, 10 aa, synthetic construct
AHQRGDFNNT

SEQ ID NO: 147129 - protein, 10 aa, synthetic construct
AHSRGDFNNT

SEQ ID NO: 147130 - protein, 10 aa, synthetic construct
AHTRGDFNNT

SEQ ID NO: 147131 - protein, 10 aa, synthetic construct
AHFRGDFNNT

SEQ ID NO: 147132 - protein, 10 aa, synthetic construct
AHGRGDFNNT

SEQ ID NO: 147133 - protein, 10 aa, synthetic construct
AHHRGDFNNT

SEQ ID NO: 147134 - protein, 10 aa, synthetic construct
AHIRGDFNNT

SEQ ID NO: 147135 - protein, 10 aa, synthetic construct
AHKRGDFNNT

SEQ ID NO: 147136 - protein, 10 aa, synthetic construct
AHLRGDFNNT

SEQ ID NO: 147137 - protein, 10 aa, synthetic construct
AHMRGDFNNT

SEQ ID NO: 147138 - protein, 10 aa, synthetic construct
AHPRGDFNNT

SEQ ID NO: 147139 - protein, 10 aa, synthetic construct
AHRRGDFNNT

SEQ ID NO: 147140 - protein, 10 aa, synthetic construct
AHVRGDFNNT

SEQ ID NO: 147141 - protein, 10 aa, synthetic construct
AHWRGDFNNT

SEQ ID NO: 147142 - protein, 10 aa, synthetic construct
AHYRGDFNNT

SEQ ID NO: 147143 - protein, 10 aa, synthetic construct
AIARGDFNNT

SEQ ID NO: 147144 - protein, 10 aa, synthetic construct
AIDRGDFNNT

SEQ ID NO: 147145 - protein, 10 aa, synthetic construct
AIERGDFNNT

SEQ ID NO: 147146 - protein, 10 aa, synthetic construct
AINRGDFNNT

SEQ ID NO: 147147 - protein, 10 aa, synthetic construct
AIQRGDFNNT

SEQ ID NO: 147148 - protein, 10 aa, synthetic construct
AISRGDFNNT

SEQ ID NO: 147149 - protein, 10 aa, synthetic construct
AITRGDFNNT

SEQ ID NO: 147150 - protein, 10 aa, synthetic construct
AIFRGDFNNT

SEQ ID NO: 147151 - protein, 10 aa, synthetic construct
AIGRGDFNNT

SEQ ID NO: 147152 - protein, 10 aa, synthetic construct
AIHRGDFNNT

SEQ ID NO: 147153 - protein, 10 aa, synthetic construct
AIIRGDFNNT

SEQ ID NO: 147154 - protein, 10 aa, synthetic construct
AIKRGDFNNT

SEQ ID NO: 147155 - protein, 10 aa, synthetic construct
AILRGDFNNT

SEQ ID NO: 147156 - protein, 10 aa, synthetic construct
AIMRGDFNNT

SEQ ID NO: 147157 - protein, 10 aa, synthetic construct
AIPRGDFNNT

SEQ ID NO: 147158 - protein, 10 aa, synthetic construct
AIRRGDFNNT

SEQ ID NO: 147159 - protein, 10 aa, synthetic construct
AIVRGDFNNT

SEQ ID NO: 147160 - protein, 10 aa, synthetic construct
AIWRGDFNNT

SEQ ID NO: 147161 - protein, 10 aa, synthetic construct
AIYRGDFNNT

SEQ ID NO: 147162 - protein, 10 aa, synthetic construct
AKARGDFNNT

SEQ ID NO: 147163 - protein, 10 aa, synthetic construct
AKDRGDFNNT

SEQ ID NO: 147164 - protein, 10 aa, synthetic construct
AKERGDFNNT

SEQ ID NO: 147165 - protein, 10 aa, synthetic construct
AKNRGDFNNT

SEQ ID NO: 147166 - protein, 10 aa, synthetic construct
AKQRGDFNNT

SEQ ID NO: 147167 - protein, 10 aa, synthetic construct
AKSRGDFNNT

SEQ ID NO: 147168 - protein, 10 aa, synthetic construct
AKTRGDFNNT

SEQ ID NO: 147169 - protein, 10 aa, synthetic construct
AKFRGDFNNT

SEQ ID NO: 147170 - protein, 10 aa, synthetic construct
AKGRGDFNNT

SEQ ID NO: 147171 - protein, 10 aa, synthetic construct
AKHRGDFNNT

SEQ ID NO: 147172 - protein, 10 aa, synthetic construct
AKIRGDFNNT

SEQ ID NO: 147173 - protein, 10 aa, synthetic construct
AKKRGDFNNT

SEQ ID NO: 147174 - protein, 10 aa, synthetic construct
AKLRGDFNNT

SEQ ID NO: 147175 - protein, 10 aa, synthetic construct
AKMRGDFNNT

SEQ ID NO: 147176 - protein, 10 aa, synthetic construct
AKPRGDFNNT

SEQ ID NO: 147177 - protein, 10 aa, synthetic construct
AKRRGDFNNT

SEQ ID NO: 147178 - protein, 10 aa, synthetic construct
AKVRGDFNNT

SEQ ID NO: 147179 - protein, 10 aa, synthetic construct
AKWRGDFNNT

SEQ ID NO: 147180 - protein, 10 aa, synthetic construct
AKYRGDFNNT

SEQ ID NO: 147181 - protein, 10 aa, synthetic construct
ALARGDFNNT

SEQ ID NO: 147182 - protein, 10 aa, synthetic construct
ALDRGDFNNT

SEQ ID NO: 147183 - protein, 10 aa, synthetic construct
ALERGDFNNT

SEQ ID NO: 147184 - protein, 10 aa, synthetic construct
ALNRGDFNNT

SEQ ID NO: 147185 - protein, 10 aa, synthetic construct
ALQRGDFNNT

SEQ ID NO: 147186 - protein, 10 aa, synthetic construct
ALSRGDFNNT

SEQ ID NO: 147187 - protein, 10 aa, synthetic construct
ALTRGDFNNT

SEQ ID NO: 147188 - protein, 10 aa, synthetic construct
ALFRGDFNNT

SEQ ID NO: 147189 - protein, 10 aa, synthetic construct
ALGRGDFNNT

SEQ ID NO: 147190 - protein, 10 aa, synthetic construct
ALHRGDFNNT

SEQ ID NO: 147191 - protein, 10 aa, synthetic construct
ALIRGDFNNT

SEQ ID NO: 147192 - protein, 10 aa, synthetic construct
ALKRGDFNNT

SEQ ID NO: 147193 - protein, 10 aa, synthetic construct
ALLRGDFNNT

SEQ ID NO: 147194 - protein, 10 aa, synthetic construct
ALMRGDFNNT

SEQ ID NO: 147195 - protein, 10 aa, synthetic construct
ALPRGDFNNT

SEQ ID NO: 147196 - protein, 10 aa, synthetic construct
ALRRGDFNNT

SEQ ID NO: 147197 - protein, 10 aa, synthetic construct
ALVRGDFNNT

SEQ ID NO: 147198 - protein, 10 aa, synthetic construct
ALWRGDFNNT

SEQ ID NO: 147199 - protein, 10 aa, synthetic construct
ALYRGDFNNT

SEQ ID NO: 147200 - protein, 10 aa, synthetic construct
AMARGDFNNT

SEQ ID NO: 147201 - protein, 10 aa, synthetic construct
AMDRGDFNNT

SEQ ID NO: 147202 - protein, 10 aa, synthetic construct
AMERGDFNNT

SEQ ID NO: 147203 - protein, 10 aa, synthetic construct
AMNRGDFNNT

SEQ ID NO: 147204 - protein, 10 aa, synthetic construct
AMQRGDFNNT

SEQ ID NO: 147205 - protein, 10 aa, synthetic construct
AMSRGDFNNT

SEQ ID NO: 147206 - protein, 10 aa, synthetic construct
AMTRGDFNNT

SEQ ID NO: 147207 - protein, 10 aa, synthetic construct
AMFRGDFNNT

SEQ ID NO: 147208 - protein, 10 aa, synthetic construct
AMGRGDFNNT

SEQ ID NO: 147209 - protein, 10 aa, synthetic construct
AMHRGDFNNT

SEQ ID NO: 147210 - protein, 10 aa, synthetic construct
AMIRGDFNNT

SEQ ID NO: 147211 - protein, 10 aa, synthetic construct
AMKRGDFNNT

SEQ ID NO: 147212 - protein, 10 aa, synthetic construct
AMLRGDFNNT

SEQ ID NO: 147213 - protein, 10 aa, synthetic construct
AMMRGDFNNT

SEQ ID NO: 147214 - protein, 10 aa, synthetic construct
AMPRGDFNNT

SEQ ID NO: 147215 - protein, 10 aa, synthetic construct
AMRRGDFNNT

SEQ ID NO: 147216 - protein, 10 aa, synthetic construct
AMVRGDFNNT

SEQ ID NO: 147217 - protein, 10 aa, synthetic construct
AMWRGDFNNT

SEQ ID NO: 147218 - protein, 10 aa, synthetic construct
AMYRGDFNNT

SEQ ID NO: 147219 - protein, 10 aa, synthetic construct
APARGDFNNT

SEQ ID NO: 147220 - protein, 10 aa, synthetic construct
APDRGDFNNT

SEQ ID NO: 147221 - protein, 10 aa, synthetic construct
APERGDFNNT

SEQ ID NO: 147222 - protein, 10 aa, synthetic construct
APNRGDFNNT

SEQ ID NO: 147223 - protein, 10 aa, synthetic construct
APQRGDFNNT

SEQ ID NO: 147224 - protein, 10 aa, synthetic construct
APSRGDFNNT

SEQ ID NO: 147225 - protein, 10 aa, synthetic construct
APTRGDFNNT

SEQ ID NO: 147226 - protein, 10 aa, synthetic construct
APFRGDFNNT

SEQ ID NO: 147227 - protein, 10 aa, synthetic construct
APGRGDFNNT

SEQ ID NO: 147228 - protein, 10 aa, synthetic construct
APHRGDFNNT

SEQ ID NO: 147229 - protein, 10 aa, synthetic construct
APIRGDFNNT

SEQ ID NO: 147230 - protein, 10 aa, synthetic construct
APKRGDFNNT

SEQ ID NO: 147231 - protein, 10 aa, synthetic construct
APLRGDFNNT

SEQ ID NO: 147232 - protein, 10 aa, synthetic construct
APMRGDFNNT

SEQ ID NO: 147233 - protein, 10 aa, synthetic construct
APPRGDFNNT

SEQ ID NO: 147234 - protein, 10 aa, synthetic construct
APRRGDFNNT

SEQ ID NO: 147235 - protein, 10 aa, synthetic construct
APVRGDFNNT

SEQ ID NO: 147236 - protein, 10 aa, synthetic construct
APWRGDFNNT

SEQ ID NO: 147237 - protein, 10 aa, synthetic construct
APYRGDFNNT

SEQ ID NO: 147238 - protein, 10 aa, synthetic construct
ARARGDFNNT

SEQ ID NO: 147239 - protein, 10 aa, synthetic construct
ARDRGDFNNT

SEQ ID NO: 147240 - protein, 10 aa, synthetic construct
ARERGDFNNT

SEQ ID NO: 147241 - protein, 10 aa, synthetic construct
ARNRGDFNNT

SEQ ID NO: 147242 - protein, 10 aa, synthetic construct
ARQRGDFNNT

SEQ ID NO: 147243 - protein, 10 aa, synthetic construct
ARSRGDFNNT

SEQ ID NO: 147244 - protein, 10 aa, synthetic construct
ARTRGDFNNT

SEQ ID NO: 147245 - protein, 10 aa, synthetic construct
ARFRGDFNNT

SEQ ID NO: 147246 - protein, 10 aa, synthetic construct
ARGRGDFNNT

SEQ ID NO: 147247 - protein, 10 aa, synthetic construct
ARHRGDFNNT

SEQ ID NO: 147248 - protein, 10 aa, synthetic construct
ARIRGDFNNT

SEQ ID NO: 147249 - protein, 10 aa, synthetic construct
ARKRGDFNNT

SEQ ID NO: 147250 - protein, 10 aa, synthetic construct
ARLRGDFNNT

SEQ ID NO: 147251 - protein, 10 aa, synthetic construct
ARMRGDFNNT

SEQ ID NO: 147252 - protein, 10 aa, synthetic construct
ARPRGDFNNT

SEQ ID NO: 147253 - protein, 10 aa, synthetic construct
ARRRGDFNNT

SEQ ID NO: 147254 - protein, 10 aa, synthetic construct
ARVRGDFNNT

SEQ ID NO: 147255 - protein, 10 aa, synthetic construct
ARWRGDFNNT

SEQ ID NO: 147256 - protein, 10 aa, synthetic construct
ARYRGDFNNT

SEQ ID NO: 147257 - protein, 10 aa, synthetic construct
AVARGDFNNT

SEQ ID NO: 147258 - protein, 10 aa, synthetic construct
AVDRGDFNNT

SEQ ID NO: 147259 - protein, 10 aa, synthetic construct
AVERGDFNNT

SEQ ID NO: 147260 - protein, 10 aa, synthetic construct
AVNRGDFNNT

SEQ ID NO: 147261 - protein, 10 aa, synthetic construct
AVQRGDFNNT

SEQ ID NO: 147262 - protein, 10 aa, synthetic construct
AVSRGDFNNT

SEQ ID NO: 147263 - protein, 10 aa, synthetic construct
AVTRGDFNNT

SEQ ID NO: 147264 - protein, 10 aa, synthetic construct
AVFRGDFNNT

SEQ ID NO: 147265 - protein, 10 aa, synthetic construct
AVGRGDFNNT

SEQ ID NO: 147266 - protein, 10 aa, synthetic construct
AVHRGDFNNT

SEQ ID NO: 147267 - protein, 10 aa, synthetic construct
AVIRGDFNNT

SEQ ID NO: 147268 - protein, 10 aa, synthetic construct
AVKRGDFNNT

SEQ ID NO: 147269 - protein, 10 aa, synthetic construct
AVLRGDFNNT

SEQ ID NO: 147270 - protein, 10 aa, synthetic construct
AVMRGDFNNT

SEQ ID NO: 147271 - protein, 10 aa, synthetic construct
AVPRGDFNNT

SEQ ID NO: 147272 - protein, 10 aa, synthetic construct
AVRRGDFNNT

SEQ ID NO: 147273 - protein, 10 aa, synthetic construct
AVVRGDFNNT

SEQ ID NO: 147274 - protein, 10 aa, synthetic construct
AVWRGDFNNT

SEQ ID NO: 147275 - protein, 10 aa, synthetic construct
AVYRGDFNNT

SEQ ID NO: 147276 - protein, 10 aa, synthetic construct
AWARGDFNNT

SEQ ID NO: 147277 - protein, 10 aa, synthetic construct
AWDRGDFNNT

SEQ ID NO: 147278 - protein, 10 aa, synthetic construct
AWERGDFNNT

SEQ ID NO: 147279 - protein, 10 aa, synthetic construct
AWNRGDFNNT

SEQ ID NO: 147280 - protein, 10 aa, synthetic construct
AWQRGDFNNT

SEQ ID NO: 147281 - protein, 10 aa, synthetic construct
AWSRGDFNNT

SEQ ID NO: 147282 - protein, 10 aa, synthetic construct
AWTRGDFNNT

SEQ ID NO: 147283 - protein, 10 aa, synthetic construct
AWFRGDFNNT

SEQ ID NO: 147284 - protein, 10 aa, synthetic construct
AWGRGDFNNT

SEQ ID NO: 147285 - protein, 10 aa, synthetic construct
AWHRGDFNNT

SEQ ID NO: 147286 - protein, 10 aa, synthetic construct
AWIRGDFNNT

SEQ ID NO: 147287 - protein, 10 aa, synthetic construct
AWKRGDFNNT

SEQ ID NO: 147288 - protein, 10 aa, synthetic construct
AWLRGDFNNT

SEQ ID NO: 147289 - protein, 10 aa, synthetic construct
AWMRGDFNNT

SEQ ID NO: 147290 - protein, 10 aa, synthetic construct
AWPRGDFNNT

SEQ ID NO: 147291 - protein, 10 aa, synthetic construct
AWRRGDFNNT

SEQ ID NO: 147292 - protein, 10 aa, synthetic construct
AWVRGDFNNT

SEQ ID NO: 147293 - protein, 10 aa, synthetic construct
AWWRGDFNNT

SEQ ID NO: 147294 - protein, 10 aa, synthetic construct
AWYRGDFNNT

SEQ ID NO: 147295 - protein, 10 aa, synthetic construct
AYARGDFNNT

SEQ ID NO: 147296 - protein, 10 aa, synthetic construct
AYDRGDFNNT

SEQ ID NO: 147297 - protein, 10 aa, synthetic construct
AYERGDFNNT

SEQ ID NO: 147298 - protein, 10 aa, synthetic construct
AYNRGDFNNT

SEQ ID NO: 147299 - protein, 10 aa, synthetic construct
AYQRGDFNNT

SEQ ID NO: 147300 - protein, 10 aa, synthetic construct
AYSRGDFNNT

SEQ ID NO: 147301 - protein, 10 aa, synthetic construct
AYTRGDFNNT

SEQ ID NO: 147302 - protein, 10 aa, synthetic construct
AYFRGDFNNT

SEQ ID NO: 147303 - protein, 10 aa, synthetic construct
AYGRGDFNNT

SEQ ID NO: 147304 - protein, 10 aa, synthetic construct
AYHRGDFNNT

SEQ ID NO: 147305 - protein, 10 aa, synthetic construct
AYIRGDFNNT

SEQ ID NO: 147306 - protein, 10 aa, synthetic construct
AYKRGDFNNT

SEQ ID NO: 147307 - protein, 10 aa, synthetic construct
AYLRGDFNNT

SEQ ID NO: 147308 - protein, 10 aa, synthetic construct
AYMRGDFNNT

SEQ ID NO: 147309 - protein, 10 aa, synthetic construct
AYPRGDFNNT

SEQ ID NO: 147310 - protein, 10 aa, synthetic construct
AYRRGDFNNT

SEQ ID NO: 147311 - protein, 10 aa, synthetic construct
AYVRGDFNNT

SEQ ID NO: 147312 - protein, 10 aa, synthetic construct
AYWRGDFNNT

SEQ ID NO: 147313 - protein, 10 aa, synthetic construct
AYYRGDFNNT

SEQ ID NO: 147314 - protein, 10 aa, synthetic construct
DAARGDFNNT

SEQ ID NO: 147315 - protein, 10 aa, synthetic construct
DADRGDFNNT

SEQ ID NO: 147316 - protein, 10 aa, synthetic construct
DAERGDFNNT

SEQ ID NO: 147317 - protein, 10 aa, synthetic construct
DANRGDFNNT

SEQ ID NO: 147318 - protein, 10 aa, synthetic construct
DAQRGDFNNT

SEQ ID NO: 147319 - protein, 10 aa, synthetic construct
DASRGDFNNT

SEQ ID NO: 147320 - protein, 10 aa, synthetic construct
DATRGDFNNT

SEQ ID NO: 147321 - protein, 10 aa, synthetic construct
DAFRGDFNNT

SEQ ID NO: 147322 - protein, 10 aa, synthetic construct
DAGRGDFNNT

SEQ ID NO: 147323 - protein, 10 aa, synthetic construct
DAHRGDFNNT

SEQ ID NO: 147324 - protein, 10 aa, synthetic construct
DAIRGDFNNT

SEQ ID NO: 147325 - protein, 10 aa, synthetic construct
DAKRGDFNNT

SEQ ID NO: 147326 - protein, 10 aa, synthetic construct
DALRGDFNNT

SEQ ID NO: 147327 - protein, 10 aa, synthetic construct
DAMRGDFNNT

SEQ ID NO: 147328 - protein, 10 aa, synthetic construct
DAPRGDFNNT

SEQ ID NO: 147329 - protein, 10 aa, synthetic construct
DARRGDFNNT

SEQ ID NO: 147330 - protein, 10 aa, synthetic construct
DAVRGDFNNT

SEQ ID NO: 147331 - protein, 10 aa, synthetic construct
DAWRGDFNNT

SEQ ID NO: 147332 - protein, 10 aa, synthetic construct
DAYRGDFNNT

SEQ ID NO: 147333 - protein, 10 aa, synthetic construct
DDARGDFNNT

SEQ ID NO: 147334 - protein, 10 aa, synthetic construct
DDDRGDFNNT

SEQ ID NO: 147335 - protein, 10 aa, synthetic construct
DDERGDFNNT

SEQ ID NO: 147336 - protein, 10 aa, synthetic construct
DDNRGDFNNT

SEQ ID NO: 147337 - protein, 10 aa, synthetic construct
DDQRGDFNNT

SEQ ID NO: 147338 - protein, 10 aa, synthetic construct
DDSRGDFNNT

SEQ ID NO: 147339 - protein, 10 aa, synthetic construct
DDTRGDFNNT

SEQ ID NO: 147340 - protein, 10 aa, synthetic construct
DDFRGDFNNT

SEQ ID NO: 147341 - protein, 10 aa, synthetic construct
DDGRGDFNNT

SEQ ID NO: 147342 - protein, 10 aa, synthetic construct
DDHRGDFNNT

SEQ ID NO: 147343 - protein, 10 aa, synthetic construct
DDIRGDFNNT

SEQ ID NO: 147344 - protein, 10 aa, synthetic construct
DDKRGDFNNT

SEQ ID NO: 147345 - protein, 10 aa, synthetic construct
DDLRGDFNNT

SEQ ID NO: 147346 - protein, 10 aa, synthetic construct
DDMRGDFNNT

SEQ ID NO: 147347 - protein, 10 aa, synthetic construct
DDPRGDFNNT

SEQ ID NO: 147348 - protein, 10 aa, synthetic construct
DDRRGDFNNT

SEQ ID NO: 147349 - protein, 10 aa, synthetic construct
DDVRGDFNNT

SEQ ID NO: 147350 - protein, 10 aa, synthetic construct
DDWRGDFNNT

SEQ ID NO: 147351 - protein, 10 aa, synthetic construct
DDYRGDFNNT

SEQ ID NO: 147352 - protein, 10 aa, synthetic construct
DEARGDFNNT

SEQ ID NO: 147353 - protein, 10 aa, synthetic construct
DEDRGDFNNT

SEQ ID NO: 147354 - protein, 10 aa, synthetic construct
DEERGDFNNT

SEQ ID NO: 147355 - protein, 10 aa, synthetic construct
DENRGDFNNT

SEQ ID NO: 147356 - protein, 10 aa, synthetic construct
DEQRGDFNNT

SEQ ID NO: 147357 - protein, 10 aa, synthetic construct
DESRGDFNNT

SEQ ID NO: 147358 - protein, 10 aa, synthetic construct
DETRGDFNNT

SEQ ID NO: 147359 - protein, 10 aa, synthetic construct
DEFRGDFNNT

SEQ ID NO: 147360 - protein, 10 aa, synthetic construct
DEGRGDFNNT

SEQ ID NO: 147361 - protein, 10 aa, synthetic construct
DEHRGDFNNT

SEQ ID NO: 147362 - protein, 10 aa, synthetic construct
DEIRGDFNNT

SEQ ID NO: 147363 - protein, 10 aa, synthetic construct
DEKRGDFNNT

SEQ ID NO: 147364 - protein, 10 aa, synthetic construct
DELRGDFNNT

SEQ ID NO: 147365 - protein, 10 aa, synthetic construct
DEMRGDFNNT

SEQ ID NO: 147366 - protein, 10 aa, synthetic construct
DEPRGDFNNT

SEQ ID NO: 147367 - protein, 10 aa, synthetic construct
DERRGDFNNT

SEQ ID NO: 147368 - protein, 10 aa, synthetic construct
DEVRGDFNNT

SEQ ID NO: 147369 - protein, 10 aa, synthetic construct
DEWRGDFNNT

SEQ ID NO: 147370 - protein, 10 aa, synthetic construct
DEYRGDFNNT

SEQ ID NO: 147371 - protein, 10 aa, synthetic construct
DNARGDFNNT

SEQ ID NO: 147372 - protein, 10 aa, synthetic construct
DNDRGDFNNT

SEQ ID NO: 147373 - protein, 10 aa, synthetic construct
DNERGDFNNT

SEQ ID NO: 147374 - protein, 10 aa, synthetic construct
DNNRGDFNNT

SEQ ID NO: 147375 - protein, 10 aa, synthetic construct
DNQRGDFNNT

SEQ ID NO: 147376 - protein, 10 aa, synthetic construct
DNSRGDFNNT

SEQ ID NO: 147377 - protein, 10 aa, synthetic construct
DNTRGDFNNT

SEQ ID NO: 147378 - protein, 10 aa, synthetic construct
DNFRGDFNNT

SEQ ID NO: 147379 - protein, 10 aa, synthetic construct
DNGRGDFNNT

SEQ ID NO: 147380 - protein, 10 aa, synthetic construct
DNHRGDFNNT

SEQ ID NO: 147381 - protein, 10 aa, synthetic construct
DNIRGDFNNT

SEQ ID NO: 147382 - protein, 10 aa, synthetic construct
DNKRGDFNNT

SEQ ID NO: 147383 - protein, 10 aa, synthetic construct
DNLRGDFNNT

SEQ ID NO: 147384 - protein, 10 aa, synthetic construct
DNMRGDFNNT

SEQ ID NO: 147385 - protein, 10 aa, synthetic construct
DNPRGDFNNT

SEQ ID NO: 147386 - protein, 10 aa, synthetic construct
DNRRGDFNNT

SEQ ID NO: 147387 - protein, 10 aa, synthetic construct
DNVRGDFNNT

SEQ ID NO: 147388 - protein, 10 aa, synthetic construct
DNWRGDFNNT

SEQ ID NO: 147389 - protein, 10 aa, synthetic construct
DNYRGDFNNT

SEQ ID NO: 147390 - protein, 10 aa, synthetic construct
DQARGDFNNT

SEQ ID NO: 147391 - protein, 10 aa, synthetic construct
DQDRGDFNNT

SEQ ID NO: 147392 - protein, 10 aa, synthetic construct
DQERGDFNNT

SEQ ID NO: 147393 - protein, 10 aa, synthetic construct
DQNRGDFNNT

SEQ ID NO: 147394 - protein, 10 aa, synthetic construct
DQQRGDFNNT

SEQ ID NO: 147395 - protein, 10 aa, synthetic construct
DQSRGDFNNT

SEQ ID NO: 147396 - protein, 10 aa, synthetic construct
DQTRGDFNNT

SEQ ID NO: 147397 - protein, 10 aa, synthetic construct
DQFRGDFNNT

SEQ ID NO: 147398 - protein, 10 aa, synthetic construct
DQGRGDFNNT

SEQ ID NO: 147399 - protein, 10 aa, synthetic construct
DQHRGDFNNT

SEQ ID NO: 147400 - protein, 10 aa, synthetic construct
DQIRGDFNNT

SEQ ID NO: 147401 - protein, 10 aa, synthetic construct
DQKRGDFNNT

SEQ ID NO: 147402 - protein, 10 aa, synthetic construct
DQLRGDFNNT

SEQ ID NO: 147403 - protein, 10 aa, synthetic construct
DQMRGDFNNT

SEQ ID NO: 147404 - protein, 10 aa, synthetic construct
DQPRGDFNNT

SEQ ID NO: 147405 - protein, 10 aa, synthetic construct
DQRRGDFNNT

SEQ ID NO: 147406 - protein, 10 aa, synthetic construct
DQVRGDFNNT

SEQ ID NO: 147407 - protein, 10 aa, synthetic construct
DQWRGDFNNT

SEQ ID NO: 147408 - protein, 10 aa, synthetic construct
DQYRGDFNNT

SEQ ID NO: 147409 - protein, 10 aa, synthetic construct
DSARGDFNNT

SEQ ID NO: 147410 - protein, 10 aa, synthetic construct
DSDRGDFNNT

SEQ ID NO: 147411 - protein, 10 aa, synthetic construct
DSERGDFNNT

SEQ ID NO: 147412 - protein, 10 aa, synthetic construct
DSNRGDFNNT

SEQ ID NO: 147413 - protein, 10 aa, synthetic construct
DSQRGDFNNT

SEQ ID NO: 147414 - protein, 10 aa, synthetic construct
DSSRGDFNNT

SEQ ID NO: 147415 - protein, 10 aa, synthetic construct
DSTRGDFNNT

SEQ ID NO: 147416 - protein, 10 aa, synthetic construct
DSFRGDFNNT

SEQ ID NO: 147417 - protein, 10 aa, synthetic construct
DSGRGDFNNT

SEQ ID NO: 147418 - protein, 10 aa, synthetic construct
DSHRGDFNNT

SEQ ID NO: 147419 - protein, 10 aa, synthetic construct
DSIRGDFNNT

SEQ ID NO: 147420 - protein, 10 aa, synthetic construct
DSKRGDFNNT

SEQ ID NO: 147421 - protein, 10 aa, synthetic construct
DSLRGDFNNT

SEQ ID NO: 147422 - protein, 10 aa, synthetic construct
DSMRGDFNNT

SEQ ID NO: 147423 - protein, 10 aa, synthetic construct
DSPRGDFNNT

SEQ ID NO: 147424 - protein, 10 aa, synthetic construct
DSRRGDFNNT

SEQ ID NO: 147425 - protein, 10 aa, synthetic construct
DSVRGDFNNT

SEQ ID NO: 147426 - protein, 10 aa, synthetic construct
DSWRGDFNNT

SEQ ID NO: 147427 - protein, 10 aa, synthetic construct
DSYRGDFNNT

SEQ ID NO: 147428 - protein, 10 aa, synthetic construct
DTARGDFNNT

SEQ ID NO: 147429 - protein, 10 aa, synthetic construct
DTDRGDFNNT

SEQ ID NO: 147430 - protein, 10 aa, synthetic construct
DTERGDFNNT

SEQ ID NO: 147431 - protein, 10 aa, synthetic construct
DTNRGDFNNT

SEQ ID NO: 147432 - protein, 10 aa, synthetic construct
DTQRGDFNNT

SEQ ID NO: 147433 - protein, 10 aa, synthetic construct
DTSRGDFNNT

SEQ ID NO: 147434 - protein, 10 aa, synthetic construct
DTTRGDFNNT

SEQ ID NO: 147435 - protein, 10 aa, synthetic construct
DTFRGDFNNT

SEQ ID NO: 147436 - protein, 10 aa, synthetic construct
DTGRGDFNNT

SEQ ID NO: 147437 - protein, 10 aa, synthetic construct
DTHRGDFNNT

SEQ ID NO: 147438 - protein, 10 aa, synthetic construct
DTIRGDFNNT

SEQ ID NO: 147439 - protein, 10 aa, synthetic construct
DTKRGDFNNT

SEQ ID NO: 147440 - protein, 10 aa, synthetic construct
DTLRGDFNNT

SEQ ID NO: 147441 - protein, 10 aa, synthetic construct
DTMRGDFNNT

SEQ ID NO: 147442 - protein, 10 aa, synthetic construct
DTPRGDFNNT

SEQ ID NO: 147443 - protein, 10 aa, synthetic construct
DTRRGDFNNT

SEQ ID NO: 147444 - protein, 10 aa, synthetic construct
DTVRGDFNNT

SEQ ID NO: 147445 - protein, 10 aa, synthetic construct
DTWRGDFNNT

SEQ ID NO: 147446 - protein, 10 aa, synthetic construct
DTYRGDFNNT

SEQ ID NO: 147447 - protein, 10 aa, synthetic construct
DFARGDFNNT

SEQ ID NO: 147448 - protein, 10 aa, synthetic construct
DFDRGDFNNT

SEQ ID NO: 147449 - protein, 10 aa, synthetic construct
DFERGDFNNT

SEQ ID NO: 147450 - protein, 10 aa, synthetic construct
DFNRGDFNNT

SEQ ID NO: 147451 - protein, 10 aa, synthetic construct
DFQRGDFNNT

SEQ ID NO: 147452 - protein, 10 aa, synthetic construct
DFSRGDFNNT

SEQ ID NO: 147453 - protein, 10 aa, synthetic construct
DFTRGDFNNT

SEQ ID NO: 147454 - protein, 10 aa, synthetic construct
DFFRGDFNNT

SEQ ID NO: 147455 - protein, 10 aa, synthetic construct
DFGRGDFNNT

SEQ ID NO: 147456 - protein, 10 aa, synthetic construct
DFHRGDFNNT

SEQ ID NO: 147457 - protein, 10 aa, synthetic construct
DFIRGDFNNT

SEQ ID NO: 147458 - protein, 10 aa, synthetic construct
DFKRGDFNNT

SEQ ID NO: 147459 - protein, 10 aa, synthetic construct
DFLRGDFNNT

SEQ ID NO: 147460 - protein, 10 aa, synthetic construct
DFMRGDFNNT

SEQ ID NO: 147461 - protein, 10 aa, synthetic construct
DFPRGDFNNT

SEQ ID NO: 147462 - protein, 10 aa, synthetic construct
DFRRGDFNNT

SEQ ID NO: 147463 - protein, 10 aa, synthetic construct
DFVRGDFNNT

SEQ ID NO: 147464 - protein, 10 aa, synthetic construct
DFWRGDFNNT

SEQ ID NO: 147465 - protein, 10 aa, synthetic construct
DFYRGDFNNT

SEQ ID NO: 147466 - protein, 10 aa, synthetic construct
DGARGDFNNT

SEQ ID NO: 147467 - protein, 10 aa, synthetic construct
DGDRGDFNNT

SEQ ID NO: 147468 - protein, 10 aa, synthetic construct
DGERGDFNNT

SEQ ID NO: 147469 - protein, 10 aa, synthetic construct
DGNRGDFNNT

SEQ ID NO: 147470 - protein, 10 aa, synthetic construct
DGQRGDFNNT

SEQ ID NO: 147471 - protein, 10 aa, synthetic construct
DGSRGDFNNT

SEQ ID NO: 147472 - protein, 10 aa, synthetic construct
DGTRGDFNNT

SEQ ID NO: 147473 - protein, 10 aa, synthetic construct
DGFRGDFNNT

SEQ ID NO: 147474 - protein, 10 aa, synthetic construct
DGGRGDFNNT

SEQ ID NO: 147475 - protein, 10 aa, synthetic construct
DGHRGDFNNT

SEQ ID NO: 147476 - protein, 10 aa, synthetic construct
DGIRGDFNNT

SEQ ID NO: 147477 - protein, 10 aa, synthetic construct
DGKRGDFNNT

SEQ ID NO: 147478 - protein, 10 aa, synthetic construct
DGLRGDFNNT

SEQ ID NO: 147479 - protein, 10 aa, synthetic construct
DGMRGDFNNT

SEQ ID NO: 147480 - protein, 10 aa, synthetic construct
DGPRGDFNNT

SEQ ID NO: 147481 - protein, 10 aa, synthetic construct
DGRRGDFNNT

SEQ ID NO: 147482 - protein, 10 aa, synthetic construct
DGVRGDFNNT

SEQ ID NO: 147483 - protein, 10 aa, synthetic construct
DGWRGDFNNT

SEQ ID NO: 147484 - protein, 10 aa, synthetic construct
DGYRGDFNNT

SEQ ID NO: 147485 - protein, 10 aa, synthetic construct
DHARGDFNNT

SEQ ID NO: 147486 - protein, 10 aa, synthetic construct
DHDRGDFNNT

SEQ ID NO: 147487 - protein, 10 aa, synthetic construct
DHERGDFNNT

SEQ ID NO: 147488 - protein, 10 aa, synthetic construct
DHNRGDFNNT

SEQ ID NO: 147489 - protein, 10 aa, synthetic construct
DHQRGDFNNT

SEQ ID NO: 147490 - protein, 10 aa, synthetic construct
DHSRGDFNNT

SEQ ID NO: 147491 - protein, 10 aa, synthetic construct
DHTRGDFNNT

SEQ ID NO: 147492 - protein, 10 aa, synthetic construct
DHFRGDFNNT

SEQ ID NO: 147493 - protein, 10 aa, synthetic construct
DHGRGDFNNT

SEQ ID NO: 147494 - protein, 10 aa, synthetic construct
DHHRGDFNNT

SEQ ID NO: 147495 - protein, 10 aa, synthetic construct
DHIRGDFNNT

SEQ ID NO: 147496 - protein, 10 aa, synthetic construct
DHKRGDFNNT

SEQ ID NO: 147497 - protein, 10 aa, synthetic construct
DHLRGDFNNT

SEQ ID NO: 147498 - protein, 10 aa, synthetic construct
DHMRGDFNNT

SEQ ID NO: 147499 - protein, 10 aa, synthetic construct
DHPRGDFNNT

SEQ ID NO: 147500 - protein, 10 aa, synthetic construct
DHRRGDFNNT

SEQ ID NO: 147501 - protein, 10 aa, synthetic construct
DHVRGDFNNT

SEQ ID NO: 147502 - protein, 10 aa, synthetic construct
DHWRGDFNNT

SEQ ID NO: 147503 - protein, 10 aa, synthetic construct
DHYRGDFNNT

SEQ ID NO: 147504 - protein, 10 aa, synthetic construct
DIARGDFNNT

SEQ ID NO: 147505 - protein, 10 aa, synthetic construct
DIDRGDFNNT

SEQ ID NO: 147506 - protein, 10 aa, synthetic construct
DIERGDFNNT

SEQ ID NO: 147507 - protein, 10 aa, synthetic construct
DINRGDFNNT

SEQ ID NO: 147508 - protein, 10 aa, synthetic construct
DIQRGDFNNT

SEQ ID NO: 147509 - protein, 10 aa, synthetic construct
DISRGDFNNT

SEQ ID NO: 147510 - protein, 10 aa, synthetic construct
DITRGDFNNT

SEQ ID NO: 147511 - protein, 10 aa, synthetic construct
DIFRGDFNNT

SEQ ID NO: 147512 - protein, 10 aa, synthetic construct
DIGRGDFNNT

SEQ ID NO: 147513 - protein, 10 aa, synthetic construct
DIHRGDFNNT

SEQ ID NO: 147514 - protein, 10 aa, synthetic construct
DIIRGDFNNT

SEQ ID NO: 147515 - protein, 10 aa, synthetic construct
DIKRGDFNNT

SEQ ID NO: 147516 - protein, 10 aa, synthetic construct
DILRGDFNNT

SEQ ID NO: 147517 - protein, 10 aa, synthetic construct
DIMRGDFNNT

SEQ ID NO: 147518 - protein, 10 aa, synthetic construct
DIPRGDFNNT

SEQ ID NO: 147519 - protein, 10 aa, synthetic construct
DIRRGDFNNT

SEQ ID NO: 147520 - protein, 10 aa, synthetic construct
DIVRGDFNNT

SEQ ID NO: 147521 - protein, 10 aa, synthetic construct
DIWRGDFNNT

SEQ ID NO: 147522 - protein, 10 aa, synthetic construct
DIYRGDFNNT

SEQ ID NO: 147523 - protein, 10 aa, synthetic construct
DKARGDFNNT

SEQ ID NO: 147524 - protein, 10 aa, synthetic construct
DKDRGDFNNT

SEQ ID NO: 147525 - protein, 10 aa, synthetic construct
DKERGDFNNT

SEQ ID NO: 147526 - protein, 10 aa, synthetic construct
DKNRGDFNNT

SEQ ID NO: 147527 - protein, 10 aa, synthetic construct
DKQRGDFNNT

SEQ ID NO: 147528 - protein, 10 aa, synthetic construct
DKSRGDFNNT

SEQ ID NO: 147529 - protein, 10 aa, synthetic construct
DKTRGDFNNT

SEQ ID NO: 147530 - protein, 10 aa, synthetic construct
DKFRGDFNNT

SEQ ID NO: 147531 - protein, 10 aa, synthetic construct
DKGRGDFNNT

SEQ ID NO: 147532 - protein, 10 aa, synthetic construct
DKHRGDFNNT

SEQ ID NO: 147533 - protein, 10 aa, synthetic construct
DKIRGDFNNT

SEQ ID NO: 147534 - protein, 10 aa, synthetic construct
DKKRGDFNNT

SEQ ID NO: 147535 - protein, 10 aa, synthetic construct
DKLRGDFNNT

SEQ ID NO: 147536 - protein, 10 aa, synthetic construct
DKMRGDFNNT

SEQ ID NO: 147537 - protein, 10 aa, synthetic construct
DKPRGDFNNT

SEQ ID NO: 147538 - protein, 10 aa, synthetic construct
DKRRGDFNNT

SEQ ID NO: 147539 - protein, 10 aa, synthetic construct
DKVRGDFNNT

SEQ ID NO: 147540 - protein, 10 aa, synthetic construct
DKWRGDFNNT

SEQ ID NO: 147541 - protein, 10 aa, synthetic construct
DKYRGDFNNT

SEQ ID NO: 147542 - protein, 10 aa, synthetic construct
DLARGDFNNT

SEQ ID NO: 147543 - protein, 10 aa, synthetic construct
DLDRGDFNNT

SEQ ID NO: 147544 - protein, 10 aa, synthetic construct
DLERGDFNNT

SEQ ID NO: 147545 - protein, 10 aa, synthetic construct
DLNRGDFNNT

SEQ ID NO: 147546 - protein, 10 aa, synthetic construct
DLQRGDFNNT

SEQ ID NO: 147547 - protein, 10 aa, synthetic construct
DLSRGDFNNT

SEQ ID NO: 147548 - protein, 10 aa, synthetic construct
DLTRGDFNNT

SEQ ID NO: 147549 - protein, 10 aa, synthetic construct
DLFRGDFNNT

SEQ ID NO: 147550 - protein, 10 aa, synthetic construct
DLGRGDFNNT

SEQ ID NO: 147551 - protein, 10 aa, synthetic construct
DLHRGDFNNT

SEQ ID NO: 147552 - protein, 10 aa, synthetic construct
DLIRGDFNNT

SEQ ID NO: 147553 - protein, 10 aa, synthetic construct
DLKRGDFNNT

SEQ ID NO: 147554 - protein, 10 aa, synthetic construct
DLLRGDFNNT

SEQ ID NO: 147555 - protein, 10 aa, synthetic construct
DLMRGDFNNT

SEQ ID NO: 147556 - protein, 10 aa, synthetic construct
DLPRGDFNNT

SEQ ID NO: 147557 - protein, 10 aa, synthetic construct
DLRRGDFNNT

SEQ ID NO: 147558 - protein, 10 aa, synthetic construct
DLVRGDFNNT

SEQ ID NO: 147559 - protein, 10 aa, synthetic construct
DLWRGDFNNT

SEQ ID NO: 147560 - protein, 10 aa, synthetic construct
DLYRGDFNNT

SEQ ID NO: 147561 - protein, 10 aa, synthetic construct
DMARGDFNNT

SEQ ID NO: 147562 - protein, 10 aa, synthetic construct
DMDRGDFNNT

SEQ ID NO: 147563 - protein, 10 aa, synthetic construct
DMERGDFNNT

SEQ ID NO: 147564 - protein, 10 aa, synthetic construct
DMNRGDFNNT

SEQ ID NO: 147565 - protein, 10 aa, synthetic construct
DMQRGDFNNT

SEQ ID NO: 147566 - protein, 10 aa, synthetic construct
DMSRGDFNNT

SEQ ID NO: 147567 - protein, 10 aa, synthetic construct
DMTRGDFNNT

SEQ ID NO: 147568 - protein, 10 aa, synthetic construct
DMFRGDFNNT

SEQ ID NO: 147569 - protein, 10 aa, synthetic construct
DMGRGDFNNT

SEQ ID NO: 147570 - protein, 10 aa, synthetic construct
DMHRGDFNNT

SEQ ID NO: 147571 - protein, 10 aa, synthetic construct
DMIRGDFNNT

SEQ ID NO: 147572 - protein, 10 aa, synthetic construct
DMKRGDFNNT

SEQ ID NO: 147573 - protein, 10 aa, synthetic construct
DMLRGDFNNT

SEQ ID NO: 147574 - protein, 10 aa, synthetic construct
DMMRGDFNNT

SEQ ID NO: 147575 - protein, 10 aa, synthetic construct
DMPRGDFNNT

SEQ ID NO: 147576 - protein, 10 aa, synthetic construct
DMRRGDFNNT

SEQ ID NO: 147577 - protein, 10 aa, synthetic construct
DMVRGDFNNT

SEQ ID NO: 147578 - protein, 10 aa, synthetic construct
DMWRGDFNNT

SEQ ID NO: 147579 - protein, 10 aa, synthetic construct
DMYRGDFNNT

SEQ ID NO: 147580 - protein, 10 aa, synthetic construct
DPARGDFNNT

SEQ ID NO: 147581 - protein, 10 aa, synthetic construct
DPDRGDFNNT

SEQ ID NO: 147582 - protein, 10 aa, synthetic construct
DPERGDFNNT

SEQ ID NO: 147583 - protein, 10 aa, synthetic construct
DPNRGDFNNT

SEQ ID NO: 147584 - protein, 10 aa, synthetic construct
DPQRGDFNNT

SEQ ID NO: 147585 - protein, 10 aa, synthetic construct
DPSRGDFNNT

SEQ ID NO: 147586 - protein, 10 aa, synthetic construct
DPTRGDFNNT

SEQ ID NO: 147587 - protein, 10 aa, synthetic construct
DPFRGDFNNT

SEQ ID NO: 147588 - protein, 10 aa, synthetic construct
DPGRGDFNNT

SEQ ID NO: 147589 - protein, 10 aa, synthetic construct
DPHRGDFNNT

SEQ ID NO: 147590 - protein, 10 aa, synthetic construct
DPIRGDFNNT

SEQ ID NO: 147591 - protein, 10 aa, synthetic construct
DPKRGDFNNT

SEQ ID NO: 147592 - protein, 10 aa, synthetic construct
DPLRGDFNNT

SEQ ID NO: 147593 - protein, 10 aa, synthetic construct
DPMRGDFNNT

SEQ ID NO: 147594 - protein, 10 aa, synthetic construct
DPPRGDFNNT

SEQ ID NO: 147595 - protein, 10 aa, synthetic construct
DPRRGDFNNT

SEQ ID NO: 147596 - protein, 10 aa, synthetic construct
DPVRGDFNNT

SEQ ID NO: 147597 - protein, 10 aa, synthetic construct
DPWRGDFNNT

SEQ ID NO: 147598 - protein, 10 aa, synthetic construct
DPYRGDFNNT

SEQ ID NO: 147599 - protein, 10 aa, synthetic construct
DRARGDFNNT

SEQ ID NO: 147600 - protein, 10 aa, synthetic construct
DRDRGDFNNT

SEQ ID NO: 147601 - protein, 10 aa, synthetic construct
DRERGDFNNT

SEQ ID NO: 147602 - protein, 10 aa, synthetic construct
DRNRGDFNNT

SEQ ID NO: 147603 - protein, 10 aa, synthetic construct
DRQRGDFNNT

SEQ ID NO: 147604 - protein, 10 aa, synthetic construct
DRSRGDFNNT

SEQ ID NO: 147605 - protein, 10 aa, synthetic construct
DRTRGDFNNT

SEQ ID NO: 147606 - protein, 10 aa, synthetic construct
DRFRGDFNNT

SEQ ID NO: 147607 - protein, 10 aa, synthetic construct
DRGRGDFNNT

SEQ ID NO: 147608 - protein, 10 aa, synthetic construct
DRHRGDFNNT

SEQ ID NO: 147609 - protein, 10 aa, synthetic construct
DRIRGDFNNT

SEQ ID NO: 147610 - protein, 10 aa, synthetic construct
DRKRGDFNNT

SEQ ID NO: 147611 - protein, 10 aa, synthetic construct
DRLRGDFNNT

SEQ ID NO: 147612 - protein, 10 aa, synthetic construct
DRMRGDFNNT

SEQ ID NO: 147613 - protein, 10 aa, synthetic construct
DRPRGDFNNT

SEQ ID NO: 147614 - protein, 10 aa, synthetic construct
DRRRGDFNNT

SEQ ID NO: 147615 - protein, 10 aa, synthetic construct
DRVRGDFNNT

SEQ ID NO: 147616 - protein, 10 aa, synthetic construct
DRWRGDFNNT

SEQ ID NO: 147617 - protein, 10 aa, synthetic construct
DRYRGDFNNT

SEQ ID NO: 147618 - protein, 10 aa, synthetic construct
DVARGDFNNT

SEQ ID NO: 147619 - protein, 10 aa, synthetic construct
DVDRGDFNNT

SEQ ID NO: 147620 - protein, 10 aa, synthetic construct
DVERGDFNNT

SEQ ID NO: 147621 - protein, 10 aa, synthetic construct
DVNRGDFNNT

SEQ ID NO: 147622 - protein, 10 aa, synthetic construct
DVQRGDFNNT

SEQ ID NO: 147623 - protein, 10 aa, synthetic construct
DVSRGDFNNT

SEQ ID NO: 147624 - protein, 10 aa, synthetic construct
DVTRGDFNNT

SEQ ID NO: 147625 - protein, 10 aa, synthetic construct
DVFRGDFNNT

SEQ ID NO: 147626 - protein, 10 aa, synthetic construct
DVGRGDFNNT

SEQ ID NO: 147627 - protein, 10 aa, synthetic construct
DVHRGDFNNT

SEQ ID NO: 147628 - protein, 10 aa, synthetic construct
DVIRGDFNNT

SEQ ID NO: 147629 - protein, 10 aa, synthetic construct
DVKRGDFNNT

SEQ ID NO: 147630 - protein, 10 aa, synthetic construct
DVLRGDFNNT

SEQ ID NO: 147631 - protein, 10 aa, synthetic construct
DVMRGDFNNT

SEQ ID NO: 147632 - protein, 10 aa, synthetic construct
DVPRGDFNNT

SEQ ID NO: 147633 - protein, 10 aa, synthetic construct
DVRRGDFNNT

SEQ ID NO: 147634 - protein, 10 aa, synthetic construct
DVVRGDFNNT

SEQ ID NO: 147635 - protein, 10 aa, synthetic construct
DVWRGDFNNT

SEQ ID NO: 147636 - protein, 10 aa, synthetic construct
DVYRGDFNNT

SEQ ID NO: 147637 - protein, 10 aa, synthetic construct
DWARGDFNNT

SEQ ID NO: 147638 - protein, 10 aa, synthetic construct
DWDRGDFNNT

SEQ ID NO: 147639 - protein, 10 aa, synthetic construct
DWERGDFNNT

SEQ ID NO: 147640 - protein, 10 aa, synthetic construct
DWNRGDFNNT

SEQ ID NO: 147641 - protein, 10 aa, synthetic construct
DWQRGDFNNT

SEQ ID NO: 147642 - protein, 10 aa, synthetic construct
DWSRGDFNNT

SEQ ID NO: 147643 - protein, 10 aa, synthetic construct
DWTRGDFNNT

SEQ ID NO: 147644 - protein, 10 aa, synthetic construct
DWFRGDFNNT

SEQ ID NO: 147645 - protein, 10 aa, synthetic construct
DWGRGDFNNT

SEQ ID NO: 147646 - protein, 10 aa, synthetic construct
DWHRGDFNNT

SEQ ID NO: 147647 - protein, 10 aa, synthetic construct
DWIRGDFNNT

SEQ ID NO: 147648 - protein, 10 aa, synthetic construct
DWKRGDFNNT

SEQ ID NO: 147649 - protein, 10 aa, synthetic construct
DWLRGDFNNT

SEQ ID NO: 147650 - protein, 10 aa, synthetic construct
DWMRGDFNNT

SEQ ID NO: 147651 - protein, 10 aa, synthetic construct
DWPRGDFNNT

SEQ ID NO: 147652 - protein, 10 aa, synthetic construct
DWRRGDFNNT

SEQ ID NO: 147653 - protein, 10 aa, synthetic construct
DWVRGDFNNT

SEQ ID NO: 147654 - protein, 10 aa, synthetic construct
DWWRGDFNNT

SEQ ID NO: 147655 - protein, 10 aa, synthetic construct
DWYRGDFNNT

SEQ ID NO: 147656 - protein, 10 aa, synthetic construct
DYARGDFNNT

SEQ ID NO: 147657 - protein, 10 aa, synthetic construct
DYDRGDFNNT

SEQ ID NO: 147658 - protein, 10 aa, synthetic construct
DYERGDFNNT

SEQ ID NO: 147659 - protein, 10 aa, synthetic construct
DYNRGDFNNT

SEQ ID NO: 147660 - protein, 10 aa, synthetic construct
DYQRGDFNNT

SEQ ID NO: 147661 - protein, 10 aa, synthetic construct
DYSRGDFNNT

SEQ ID NO: 147662 - protein, 10 aa, synthetic construct
DYTRGDFNNT

SEQ ID NO: 147663 - protein, 10 aa, synthetic construct
DYFRGDFNNT

SEQ ID NO: 147664 - protein, 10 aa, synthetic construct
DYGRGDFNNT

SEQ ID NO: 147665 - protein, 10 aa, synthetic construct
DYHRGDFNNT

SEQ ID NO: 147666 - protein, 10 aa, synthetic construct
DYIRGDFNNT

SEQ ID NO: 147667 - protein, 10 aa, synthetic construct
DYKRGDFNNT

SEQ ID NO: 147668 - protein, 10 aa, synthetic construct
DYLRGDFNNT

SEQ ID NO: 147669 - protein, 10 aa, synthetic construct
DYMRGDFNNT

SEQ ID NO: 147670 - protein, 10 aa, synthetic construct
DYPRGDFNNT

SEQ ID NO: 147671 - protein, 10 aa, synthetic construct
DYRRGDFNNT

SEQ ID NO: 147672 - protein, 10 aa, synthetic construct
DYVRGDFNNT

SEQ ID NO: 147673 - protein, 10 aa, synthetic construct
DYWRGDFNNT

SEQ ID NO: 147674 - protein, 10 aa, synthetic construct
DYYRGDFNNT

SEQ ID NO: 147675 - protein, 10 aa, synthetic construct
EAARGDFNNT

SEQ ID NO: 147676 - protein, 10 aa, synthetic construct
EADRGDFNNT

SEQ ID NO: 147677 - protein, 10 aa, synthetic construct
EAERGDFNNT

SEQ ID NO: 147678 - protein, 10 aa, synthetic construct
EANRGDFNNT

SEQ ID NO: 147679 - protein, 10 aa, synthetic construct
EAQRGDFNNT

SEQ ID NO: 147680 - protein, 10 aa, synthetic construct
EASRGDFNNT

SEQ ID NO: 147681 - protein, 10 aa, synthetic construct
EATRGDFNNT

SEQ ID NO: 147682 - protein, 10 aa, synthetic construct
EAFRGDFNNT

SEQ ID NO: 147683 - protein, 10 aa, synthetic construct
EAGRGDFNNT

SEQ ID NO: 147684 - protein, 10 aa, synthetic construct
EAHRGDFNNT

SEQ ID NO: 147685 - protein, 10 aa, synthetic construct
EAIRGDFNNT

SEQ ID NO: 147686 - protein, 10 aa, synthetic construct
EAKRGDFNNT

SEQ ID NO: 147687 - protein, 10 aa, synthetic construct
EALRGDFNNT

SEQ ID NO: 147688 - protein, 10 aa, synthetic construct
EAMRGDFNNT

SEQ ID NO: 147689 - protein, 10 aa, synthetic construct
EAPRGDFNNT

SEQ ID NO: 147690 - protein, 10 aa, synthetic construct
EARRGDFNNT

SEQ ID NO: 147691 - protein, 10 aa, synthetic construct
EAVRGDFNNT

SEQ ID NO: 147692 - protein, 10 aa, synthetic construct
EAWRGDFNNT

SEQ ID NO: 147693 - protein, 10 aa, synthetic construct
EAYRGDFNNT

SEQ ID NO: 147694 - protein, 10 aa, synthetic construct
EDARGDFNNT

SEQ ID NO: 147695 - protein, 10 aa, synthetic construct
EDDRGDFNNT

SEQ ID NO: 147696 - protein, 10 aa, synthetic construct
EDERGDFNNT

SEQ ID NO: 147697 - protein, 10 aa, synthetic construct
EDNRGDFNNT

SEQ ID NO: 147698 - protein, 10 aa, synthetic construct
EDQRGDFNNT

SEQ ID NO: 147699 - protein, 10 aa, synthetic construct
EDSRGDFNNT

SEQ ID NO: 147700 - protein, 10 aa, synthetic construct
EDTRGDFNNT

SEQ ID NO: 147701 - protein, 10 aa, synthetic construct
EDFRGDFNNT

SEQ ID NO: 147702 - protein, 10 aa, synthetic construct
EDGRGDFNNT

SEQ ID NO: 147703 - protein, 10 aa, synthetic construct
EDHRGDFNNT

SEQ ID NO: 147704 - protein, 10 aa, synthetic construct
EDIRGDFNNT

SEQ ID NO: 147705 - protein, 10 aa, synthetic construct
EDKRGDFNNT

SEQ ID NO: 147706 - protein, 10 aa, synthetic construct
EDLRGDFNNT

SEQ ID NO: 147707 - protein, 10 aa, synthetic construct
EDMRGDFNNT

SEQ ID NO: 147708 - protein, 10 aa, synthetic construct
EDPRGDFNNT

SEQ ID NO: 147709 - protein, 10 aa, synthetic construct
EDRRGDFNNT

SEQ ID NO: 147710 - protein, 10 aa, synthetic construct
EDVRGDFNNT

SEQ ID NO: 147711 - protein, 10 aa, synthetic construct
EDWRGDFNNT

SEQ ID NO: 147712 - protein, 10 aa, synthetic construct
EDYRGDFNNT

SEQ ID NO: 147713 - protein, 10 aa, synthetic construct
EEARGDFNNT

SEQ ID NO: 147714 - protein, 10 aa, synthetic construct
EEDRGDFNNT

SEQ ID NO: 147715 - protein, 10 aa, synthetic construct
EEERGDFNNT

SEQ ID NO: 147716 - protein, 10 aa, synthetic construct
EENRGDFNNT

SEQ ID NO: 147717 - protein, 10 aa, synthetic construct
EEQRGDFNNT

SEQ ID NO: 147718 - protein, 10 aa, synthetic construct
EESRGDFNNT

SEQ ID NO: 147719 - protein, 10 aa, synthetic construct
EETRGDFNNT

SEQ ID NO: 147720 - protein, 10 aa, synthetic construct
EEFRGDFNNT

SEQ ID NO: 147721 - protein, 10 aa, synthetic construct
EEGRGDFNNT

SEQ ID NO: 147722 - protein, 10 aa, synthetic construct
EEHRGDFNNT

SEQ ID NO: 147723 - protein, 10 aa, synthetic construct
EEIRGDFNNT

SEQ ID NO: 147724 - protein, 10 aa, synthetic construct
EEKRGDFNNT

SEQ ID NO: 147725 - protein, 10 aa, synthetic construct
EELRGDFNNT

SEQ ID NO: 147726 - protein, 10 aa, synthetic construct
EEMRGDFNNT

SEQ ID NO: 147727 - protein, 10 aa, synthetic construct
EEPRGDFNNT

SEQ ID NO: 147728 - protein, 10 aa, synthetic construct
EERRGDFNNT

SEQ ID NO: 147729 - protein, 10 aa, synthetic construct
EEVRGDFNNT

SEQ ID NO: 147730 - protein, 10 aa, synthetic construct
EEWRGDFNNT

SEQ ID NO: 147731 - protein, 10 aa, synthetic construct
EEYRGDFNNT

SEQ ID NO: 147732 - protein, 10 aa, synthetic construct
ENARGDFNNT

SEQ ID NO: 147733 - protein, 10 aa, synthetic construct
ENDRGDFNNT

SEQ ID NO: 147734 - protein, 10 aa, synthetic construct
ENERGDFNNT

SEQ ID NO: 147735 - protein, 10 aa, synthetic construct
ENNRGDFNNT

SEQ ID NO: 147736 - protein, 10 aa, synthetic construct
ENQRGDFNNT

SEQ ID NO: 147737 - protein, 10 aa, synthetic construct
ENSRGDFNNT

SEQ ID NO: 147738 - protein, 10 aa, synthetic construct
ENTRGDFNNT

SEQ ID NO: 147739 - protein, 10 aa, synthetic construct
ENFRGDFNNT

SEQ ID NO: 147740 - protein, 10 aa, synthetic construct
ENGRGDFNNT

SEQ ID NO: 147741 - protein, 10 aa, synthetic construct
ENHRGDFNNT

SEQ ID NO: 147742 - protein, 10 aa, synthetic construct
ENIRGDFNNT

SEQ ID NO: 147743 - protein, 10 aa, synthetic construct
ENKRGDFNNT

SEQ ID NO: 147744 - protein, 10 aa, synthetic construct
ENLRGDFNNT

SEQ ID NO: 147745 - protein, 10 aa, synthetic construct
ENMRGDFNNT

SEQ ID NO: 147746 - protein, 10 aa, synthetic construct
ENPRGDFNNT

SEQ ID NO: 147747 - protein, 10 aa, synthetic construct
ENVRGDFNNT

SEQ ID NO: 147748 - protein, 10 aa, synthetic construct
ENWRGDFNNT

SEQ ID NO: 147749 - protein, 10 aa, synthetic construct
ENYRGDFNNT

SEQ ID NO: 147750 - protein, 10 aa, synthetic construct
EQARGDFNNT

SEQ ID NO: 147751 - protein, 10 aa, synthetic construct
EQDRGDFNNT

SEQ ID NO: 147752 - protein, 10 aa, synthetic construct
EQERGDFNNT

SEQ ID NO: 147753 - protein, 10 aa, synthetic construct
EQNRGDFNNT

SEQ ID NO: 147754 - protein, 10 aa, synthetic construct
EQQRGDFNNT

SEQ ID NO: 147755 - protein, 10 aa, synthetic construct
EQSRGDFNNT

SEQ ID NO: 147756 - protein, 10 aa, synthetic construct
EQTRGDFNNT

SEQ ID NO: 147757 - protein, 10 aa, synthetic construct
EQFRGDFNNT

SEQ ID NO: 147758 - protein, 10 aa, synthetic construct
EQGRGDFNNT

SEQ ID NO: 147759 - protein, 10 aa, synthetic construct
EQHRGDFNNT

SEQ ID NO: 147760 - protein, 10 aa, synthetic construct
EQIRGDFNNT

SEQ ID NO: 147761 - protein, 10 aa, synthetic construct
EQKRGDFNNT

SEQ ID NO: 147762 - protein, 10 aa, synthetic construct
EQLRGDFNNT

SEQ ID NO: 147763 - protein, 10 aa, synthetic construct
EQMRGDFNNT

SEQ ID NO: 147764 - protein, 10 aa, synthetic construct
EQPRGDFNNT

SEQ ID NO: 147765 - protein, 10 aa, synthetic construct
EQRRGDFNNT

SEQ ID NO: 147766 - protein, 10 aa, synthetic construct
EQVRGDFNNT

SEQ ID NO: 147767 - protein, 10 aa, synthetic construct
EQWRGDFNNT

SEQ ID NO: 147768 - protein, 10 aa, synthetic construct
EQYRGDFNNT

SEQ ID NO: 147769 - protein, 10 aa, synthetic construct
ESARGDFNNT

SEQ ID NO: 147770 - protein, 10 aa, synthetic construct
ESDRGDFNNT

SEQ ID NO: 147771 - protein, 10 aa, synthetic construct
ESERGDFNNT

SEQ ID NO: 147772 - protein, 10 aa, synthetic construct
ESNRGDFNNT

SEQ ID NO: 147773 - protein, 10 aa, synthetic construct
ESQRGDFNNT

SEQ ID NO: 147774 - protein, 10 aa, synthetic construct
ESSRGDFNNT

SEQ ID NO: 147775 - protein, 10 aa, synthetic construct
ESTRGDFNNT

SEQ ID NO: 147776 - protein, 10 aa, synthetic construct
ESFRGDFNNT

SEQ ID NO: 147777 - protein, 10 aa, synthetic construct
ESGRGDFNNT

SEQ ID NO: 147778 - protein, 10 aa, synthetic construct
ESHRGDFNNT

SEQ ID NO: 147779 - protein, 10 aa, synthetic construct
ESIRGDFNNT

SEQ ID NO: 147780 - protein, 10 aa, synthetic construct
ESKRGDFNNT

SEQ ID NO: 147781 - protein, 10 aa, synthetic construct
ESLRGDFNNT

SEQ ID NO: 147782 - protein, 10 aa, synthetic construct
ESMRGDFNNT

SEQ ID NO: 147783 - protein, 10 aa, synthetic construct
ESPRGDFNNT

SEQ ID NO: 147784 - protein, 10 aa, synthetic construct
ESRRGDFNNT

SEQ ID NO: 147785 - protein, 10 aa, synthetic construct
ESVRGDFNNT

SEQ ID NO: 147786 - protein, 10 aa, synthetic construct
ESWRGDFNNT

SEQ ID NO: 147787 - protein, 10 aa, synthetic construct
ESYRGDFNNT

SEQ ID NO: 147788 - protein, 10 aa, synthetic construct
ETARGDFNNT

SEQ ID NO: 147789 - protein, 10 aa, synthetic construct
ETDRGDFNNT

SEQ ID NO: 147790 - protein, 10 aa, synthetic construct
ETERGDFNNT

SEQ ID NO: 147791 - protein, 10 aa, synthetic construct
ETNRGDFNNT

SEQ ID NO: 147792 - protein, 10 aa, synthetic construct
ETQRGDFNNT

SEQ ID NO: 147793 - protein, 10 aa, synthetic construct
ETSRGDFNNT

SEQ ID NO: 147794 - protein, 10 aa, synthetic construct
ETTRGDFNNT

SEQ ID NO: 147795 - protein, 10 aa, synthetic construct
ETFRGDFNNT

SEQ ID NO: 147796 - protein, 10 aa, synthetic construct
ETGRGDFNNT

SEQ ID NO: 147797 - protein, 10 aa, synthetic construct
ETHRGDFNNT

SEQ ID NO: 147798 - protein, 10 aa, synthetic construct
ETIRGDFNNT

SEQ ID NO: 147799 - protein, 10 aa, synthetic construct
ETKRGDFNNT

SEQ ID NO: 147800 - protein, 10 aa, synthetic construct
ETLRGDFNNT

SEQ ID NO: 147801 - protein, 10 aa, synthetic construct
ETMRGDFNNT

SEQ ID NO: 147802 - protein, 10 aa, synthetic construct
ETPRGDFNNT

SEQ ID NO: 147803 - protein, 10 aa, synthetic construct
ETRRGDFNNT

SEQ ID NO: 147804 - protein, 10 aa, synthetic construct
ETVRGDFNNT

SEQ ID NO: 147805 - protein, 10 aa, synthetic construct
ETWRGDFNNT

SEQ ID NO: 147806 - protein, 10 aa, synthetic construct
ETYRGDFNNT

SEQ ID NO: 147807 - protein, 10 aa, synthetic construct
EFARGDFNNT

SEQ ID NO: 147808 - protein, 10 aa, synthetic construct
EFDRGDFNNT

SEQ ID NO: 147809 - protein, 10 aa, synthetic construct
EFERGDFNNT

SEQ ID NO: 147810 - protein, 10 aa, synthetic construct
EFNRGDFNNT

SEQ ID NO: 147811 - protein, 10 aa, synthetic construct
EFQRGDFNNT

SEQ ID NO: 147812 - protein, 10 aa, synthetic construct
EFSRGDFNNT

SEQ ID NO: 147813 - protein, 10 aa, synthetic construct
EFTRGDFNNT

SEQ ID NO: 147814 - protein, 10 aa, synthetic construct
EFFRGDFNNT

SEQ ID NO: 147815 - protein, 10 aa, synthetic construct
EFGRGDFNNT

SEQ ID NO: 147816 - protein, 10 aa, synthetic construct
EFHRGDFNNT

SEQ ID NO: 147817 - protein, 10 aa, synthetic construct
EFIRGDFNNT

SEQ ID NO: 147818 - protein, 10 aa, synthetic construct
EFKRGDFNNT

SEQ ID NO: 147819 - protein, 10 aa, synthetic construct
EFLRGDFNNT

SEQ ID NO: 147820 - protein, 10 aa, synthetic construct
EFMRGDFNNT

SEQ ID NO: 147821 - protein, 10 aa, synthetic construct
EFPRGDFNNT

SEQ ID NO: 147822 - protein, 10 aa, synthetic construct
EFRRGDFNNT

SEQ ID NO: 147823 - protein, 10 aa, synthetic construct
EFVRGDFNNT

SEQ ID NO: 147824 - protein, 10 aa, synthetic construct
EFWRGDFNNT

SEQ ID NO: 147825 - protein, 10 aa, synthetic construct
EFYRGDFNNT

SEQ ID NO: 147826 - protein, 10 aa, synthetic construct
EGARGDFNNT

SEQ ID NO: 147827 - protein, 10 aa, synthetic construct
EGDRGDFNNT

SEQ ID NO: 147828 - protein, 10 aa, synthetic construct
EGERGDFNNT

SEQ ID NO: 147829 - protein, 10 aa, synthetic construct
EGNRGDFNNT

SEQ ID NO: 147830 - protein, 10 aa, synthetic construct
EGQRGDFNNT

SEQ ID NO: 147831 - protein, 10 aa, synthetic construct
EGSRGDFNNT

SEQ ID NO: 147832 - protein, 10 aa, synthetic construct
EGTRGDFNNT

SEQ ID NO: 147833 - protein, 10 aa, synthetic construct
EGFRGDFNNT

SEQ ID NO: 147834 - protein, 10 aa, synthetic construct
EGGRGDFNNT

SEQ ID NO: 147835 - protein, 10 aa, synthetic construct
EGHRGDFNNT

SEQ ID NO: 147836 - protein, 10 aa, synthetic construct
EGIRGDFNNT

SEQ ID NO: 147837 - protein, 10 aa, synthetic construct
EGKRGDFNNT

SEQ ID NO: 147838 - protein, 10 aa, synthetic construct
EGLRGDFNNT

SEQ ID NO: 147839 - protein, 10 aa, synthetic construct
EGMRGDFNNT

SEQ ID NO: 147840 - protein, 10 aa, synthetic construct
EGPRGDFNNT

SEQ ID NO: 147841 - protein, 10 aa, synthetic construct
EGRRGDFNNT

SEQ ID NO: 147842 - protein, 10 aa, synthetic construct
EGVRGDFNNT

SEQ ID NO: 147843 - protein, 10 aa, synthetic construct
EGWRGDFNNT

SEQ ID NO: 147844 - protein, 10 aa, synthetic construct
EGYRGDFNNT

SEQ ID NO: 147845 - protein, 10 aa, synthetic construct
EHARGDFNNT

SEQ ID NO: 147846 - protein, 10 aa, synthetic construct
EHDRGDFNNT

SEQ ID NO: 147847 - protein, 10 aa, synthetic construct
EHERGDFNNT

SEQ ID NO: 147848 - protein, 10 aa, synthetic construct
EHNRGDFNNT

SEQ ID NO: 147849 - protein, 10 aa, synthetic construct
EHQRGDFNNT

SEQ ID NO: 147850 - protein, 10 aa, synthetic construct
EHSRGDFNNT

SEQ ID NO: 147851 - protein, 10 aa, synthetic construct
EHTRGDFNNT

SEQ ID NO: 147852 - protein, 10 aa, synthetic construct
EHFRGDFNNT

SEQ ID NO: 147853 - protein, 10 aa, synthetic construct
EHGRGDFNNT

SEQ ID NO: 147854 - protein, 10 aa, synthetic construct
EHHRGDFNNT

SEQ ID NO: 147855 - protein, 10 aa, synthetic construct
EHIRGDFNNT

SEQ ID NO: 147856 - protein, 10 aa, synthetic construct
EHKRGDFNNT

SEQ ID NO: 147857 - protein, 10 aa, synthetic construct
EHLRGDFNNT

SEQ ID NO: 147858 - protein, 10 aa, synthetic construct
EHMRGDFNNT

SEQ ID NO: 147859 - protein, 10 aa, synthetic construct
EHPRGDFNNT

SEQ ID NO: 147860 - protein, 10 aa, synthetic construct
EHRRGDFNNT

SEQ ID NO: 147861 - protein, 10 aa, synthetic construct
EHVRGDFNNT

SEQ ID NO: 147862 - protein, 10 aa, synthetic construct
EHWRGDFNNT

SEQ ID NO: 147863 - protein, 10 aa, synthetic construct
EHYRGDFNNT

SEQ ID NO: 147864 - protein, 10 aa, synthetic construct
EIARGDFNNT

SEQ ID NO: 147865 - protein, 10 aa, synthetic construct
EIDRGDFNNT

SEQ ID NO: 147866 - protein, 10 aa, synthetic construct
EIERGDFNNT

SEQ ID NO: 147867 - protein, 10 aa, synthetic construct
EINRGDFNNT

SEQ ID NO: 147868 - protein, 10 aa, synthetic construct
EIQRGDFNNT

SEQ ID NO: 147869 - protein, 10 aa, synthetic construct
EISRGDFNNT

SEQ ID NO: 147870 - protein, 10 aa, synthetic construct
EITRGDFNNT

SEQ ID NO: 147871 - protein, 10 aa, synthetic construct
EIFRGDFNNT

SEQ ID NO: 147872 - protein, 10 aa, synthetic construct
EIGRGDFNNT

SEQ ID NO: 147873 - protein, 10 aa, synthetic construct
EIHRGDFNNT

SEQ ID NO: 147874 - protein, 10 aa, synthetic construct
EIIRGDFNNT

SEQ ID NO: 147875 - protein, 10 aa, synthetic construct
EIKRGDFNNT

SEQ ID NO: 147876 - protein, 10 aa, synthetic construct
EILRGDFNNT

SEQ ID NO: 147877 - protein, 10 aa, synthetic construct
EIMRGDFNNT

SEQ ID NO: 147878 - protein, 10 aa, synthetic construct
EIPRGDFNNT

SEQ ID NO: 147879 - protein, 10 aa, synthetic construct
EIRRGDFNNT

SEQ ID NO: 147880 - protein, 10 aa, synthetic construct
EIVRGDFNNT

SEQ ID NO: 147881 - protein, 10 aa, synthetic construct
EIWRGDFNNT

SEQ ID NO: 147882 - protein, 10 aa, synthetic construct
EIYRGDFNNT

SEQ ID NO: 147883 - protein, 10 aa, synthetic construct
EKARGDFNNT

SEQ ID NO: 147884 - protein, 10 aa, synthetic construct
EKDRGDFNNT

SEQ ID NO: 147885 - protein, 10 aa, synthetic construct
EKERGDFNNT

SEQ ID NO: 147886 - protein, 10 aa, synthetic construct
EKNRGDFNNT

SEQ ID NO: 147887 - protein, 10 aa, synthetic construct
EKQRGDFNNT

SEQ ID NO: 147888 - protein, 10 aa, synthetic construct
EKSRGDFNNT

SEQ ID NO: 147889 - protein, 10 aa, synthetic construct
EKTRGDFNNT

SEQ ID NO: 147890 - protein, 10 aa, synthetic construct
EKFRGDFNNT

SEQ ID NO: 147891 - protein, 10 aa, synthetic construct
EKGRGDFNNT

SEQ ID NO: 147892 - protein, 10 aa, synthetic construct
EKHRGDFNNT

SEQ ID NO: 147893 - protein, 10 aa, synthetic construct
EKIRGDFNNT

SEQ ID NO: 147894 - protein, 10 aa, synthetic construct
EKKRGDFNNT

SEQ ID NO: 147895 - protein, 10 aa, synthetic construct
EKLRGDFNNT

SEQ ID NO: 147896 - protein, 10 aa, synthetic construct
EKMRGDFNNT

SEQ ID NO: 147897 - protein, 10 aa, synthetic construct
EKPRGDFNNT

SEQ ID NO: 147898 - protein, 10 aa, synthetic construct
EKRRGDFNNT

SEQ ID NO: 147899 - protein, 10 aa, synthetic construct
EKVRGDFNNT

SEQ ID NO: 147900 - protein, 10 aa, synthetic construct
EKWRGDFNNT

SEQ ID NO: 147901 - protein, 10 aa, synthetic construct
EKYRGDFNNT

SEQ ID NO: 147902 - protein, 10 aa, synthetic construct
ELARGDFNNT

SEQ ID NO: 147903 - protein, 10 aa, synthetic construct
ELDRGDFNNT

SEQ ID NO: 147904 - protein, 10 aa, synthetic construct
ELERGDFNNT

SEQ ID NO: 147905 - protein, 10 aa, synthetic construct
ELNRGDFNNT

SEQ ID NO: 147906 - protein, 10 aa, synthetic construct
ELQRGDFNNT

SEQ ID NO: 147907 - protein, 10 aa, synthetic construct
ELSRGDFNNT

SEQ ID NO: 147908 - protein, 10 aa, synthetic construct
ELTRGDFNNT

SEQ ID NO: 147909 - protein, 10 aa, synthetic construct
ELFRGDFNNT

SEQ ID NO: 147910 - protein, 10 aa, synthetic construct
ELGRGDFNNT

SEQ ID NO: 147911 - protein, 10 aa, synthetic construct
ELHRGDFNNT

SEQ ID NO: 147912 - protein, 10 aa, synthetic construct
ELIRGDFNNT

SEQ ID NO: 147913 - protein, 10 aa, synthetic construct
ELKRGDFNNT

SEQ ID NO: 147914 - protein, 10 aa, synthetic construct
ELLRGDFNNT

SEQ ID NO: 147915 - protein, 10 aa, synthetic construct
ELMRGDFNNT

SEQ ID NO: 147916 - protein, 10 aa, synthetic construct
ELPRGDFNNT

SEQ ID NO: 147917 - protein, 10 aa, synthetic construct
ELRRGDFNNT

SEQ ID NO: 147918 - protein, 10 aa, synthetic construct
ELVRGDFNNT

SEQ ID NO: 147919 - protein, 10 aa, synthetic construct
ELWRGDFNNT

SEQ ID NO: 147920 - protein, 10 aa, synthetic construct
ELYRGDFNNT

SEQ ID NO: 147921 - protein, 10 aa, synthetic construct
EMARGDFNNT

SEQ ID NO: 147922 - protein, 10 aa, synthetic construct
EMDRGDFNNT

SEQ ID NO: 147923 - protein, 10 aa, synthetic construct
EMERGDFNNT

SEQ ID NO: 147924 - protein, 10 aa, synthetic construct
EMNRGDFNNT

SEQ ID NO: 147925 - protein, 10 aa, synthetic construct
EMQRGDFNNT

SEQ ID NO: 147926 - protein, 10 aa, synthetic construct
EMSRGDFNNT

SEQ ID NO: 147927 - protein, 10 aa, synthetic construct
EMTRGDFNNT

SEQ ID NO: 147928 - protein, 10 aa, synthetic construct
EMFRGDFNNT

SEQ ID NO: 147929 - protein, 10 aa, synthetic construct
EMGRGDFNNT

SEQ ID NO: 147930 - protein, 10 aa, synthetic construct
EMHRGDFNNT

SEQ ID NO: 147931 - protein, 10 aa, synthetic construct
EMIRGDFNNT

SEQ ID NO: 147932 - protein, 10 aa, synthetic construct
EMKRGDFNNT

SEQ ID NO: 147933 - protein, 10 aa, synthetic construct
EMLRGDFNNT

SEQ ID NO: 147934 - protein, 10 aa, synthetic construct
EMMRGDFNNT

SEQ ID NO: 147935 - protein, 10 aa, synthetic construct
EMPRGDFNNT

SEQ ID NO: 147936 - protein, 10 aa, synthetic construct
EMRRGDFNNT

SEQ ID NO: 147937 - protein, 10 aa, synthetic construct
EMVRGDFNNT

SEQ ID NO: 147938 - protein, 10 aa, synthetic construct
EMWRGDFNNT

SEQ ID NO: 147939 - protein, 10 aa, synthetic construct
EMYRGDFNNT

SEQ ID NO: 147940 - protein, 10 aa, synthetic construct
EPARGDFNNT

SEQ ID NO: 147941 - protein, 10 aa, synthetic construct
EPDRGDFNNT

SEQ ID NO: 147942 - protein, 10 aa, synthetic construct
EPERGDFNNT

SEQ ID NO: 147943 - protein, 10 aa, synthetic construct
EPNRGDFNNT

SEQ ID NO: 147944 - protein, 10 aa, synthetic construct
EPQRGDFNNT

SEQ ID NO: 147945 - protein, 10 aa, synthetic construct
EPSRGDFNNT

SEQ ID NO: 147946 - protein, 10 aa, synthetic construct
EPTRGDFNNT

SEQ ID NO: 147947 - protein, 10 aa, synthetic construct
EPFRGDFNNT

SEQ ID NO: 147948 - protein, 10 aa, synthetic construct
EPGRGDFNNT

SEQ ID NO: 147949 - protein, 10 aa, synthetic construct
EPHRGDFNNT

SEQ ID NO: 147950 - protein, 10 aa, synthetic construct
EPIRGDFNNT

SEQ ID NO: 147951 - protein, 10 aa, synthetic construct
EPKRGDFNNT

SEQ ID NO: 147952 - protein, 10 aa, synthetic construct
EPLRGDFNNT

SEQ ID NO: 147953 - protein, 10 aa, synthetic construct
EPMRGDFNNT

SEQ ID NO: 147954 - protein, 10 aa, synthetic construct
EPPRGDFNNT

SEQ ID NO: 147955 - protein, 10 aa, synthetic construct
EPRRGDFNNT

SEQ ID NO: 147956 - protein, 10 aa, synthetic construct
EPVRGDFNNT

SEQ ID NO: 147957 - protein, 10 aa, synthetic construct
EPWRGDFNNT

SEQ ID NO: 147958 - protein, 10 aa, synthetic construct
EPYRGDFNNT

SEQ ID NO: 147959 - protein, 10 aa, synthetic construct
ERARGDFNNT

SEQ ID NO: 147960 - protein, 10 aa, synthetic construct
ERDRGDFNNT

SEQ ID NO: 147961 - protein, 10 aa, synthetic construct
ERERGDFNNT

SEQ ID NO: 147962 - protein, 10 aa, synthetic construct
ERNRGDFNNT

SEQ ID NO: 147963 - protein, 10 aa, synthetic construct
ERQRGDFNNT

SEQ ID NO: 147964 - protein, 10 aa, synthetic construct
ERSRGDFNNT

SEQ ID NO: 147965 - protein, 10 aa, synthetic construct
ERTRGDFNNT

SEQ ID NO: 147966 - protein, 10 aa, synthetic construct
ERFRGDFNNT

SEQ ID NO: 147967 - protein, 10 aa, synthetic construct
ERGRGDFNNT

SEQ ID NO: 147968 - protein, 10 aa, synthetic construct
ERHRGDFNNT

SEQ ID NO: 147969 - protein, 10 aa, synthetic construct
ERIRGDFNNT

SEQ ID NO: 147970 - protein, 10 aa, synthetic construct
ERKRGDFNNT

SEQ ID NO: 147971 - protein, 10 aa, synthetic construct
ERLRGDFNNT

SEQ ID NO: 147972 - protein, 10 aa, synthetic construct
ERMRGDFNNT

SEQ ID NO: 147973 - protein, 10 aa, synthetic construct
ERPRGDFNNT

SEQ ID NO: 147974 - protein, 10 aa, synthetic construct
ERRRGDFNNT

SEQ ID NO: 147975 - protein, 10 aa, synthetic construct
ERVRGDFNNT

SEQ ID NO: 147976 - protein, 10 aa, synthetic construct
ERWRGDFNNT

SEQ ID NO: 147977 - protein, 10 aa, synthetic construct
ERYRGDFNNT

SEQ ID NO: 147978 - protein, 10 aa, synthetic construct
EVARGDFNNT

SEQ ID NO: 147979 - protein, 10 aa, synthetic construct
EVDRGDFNNT

SEQ ID NO: 147980 - protein, 10 aa, synthetic construct
EVERGDFNNT

SEQ ID NO: 147981 - protein, 10 aa, synthetic construct
EVNRGDFNNT

SEQ ID NO: 147982 - protein, 10 aa, synthetic construct
EVQRGDFNNT

SEQ ID NO: 147983 - protein, 10 aa, synthetic construct
EVSRGDFNNT

SEQ ID NO: 147984 - protein, 10 aa, synthetic construct
EVTRGDFNNT

SEQ ID NO: 147985 - protein, 10 aa, synthetic construct
EVFRGDFNNT

SEQ ID NO: 147986 - protein, 10 aa, synthetic construct
EVGRGDFNNT

SEQ ID NO: 147987 - protein, 10 aa, synthetic construct
EVHRGDFNNT

SEQ ID NO: 147988 - protein, 10 aa, synthetic construct
EVIRGDFNNT

SEQ ID NO: 147989 - protein, 10 aa, synthetic construct
EVKRGDFNNT

SEQ ID NO: 147990 - protein, 10 aa, synthetic construct
EVLRGDFNNT

SEQ ID NO: 147991 - protein, 10 aa, synthetic construct
EVMRGDFNNT

SEQ ID NO: 147992 - protein, 10 aa, synthetic construct
EVPRGDFNNT

SEQ ID NO: 147993 - protein, 10 aa, synthetic construct
EVRRGDFNNT

SEQ ID NO: 147994 - protein, 10 aa, synthetic construct
EVVRGDFNNT

SEQ ID NO: 147995 - protein, 10 aa, synthetic construct
EVWRGDFNNT

SEQ ID NO: 147996 - protein, 10 aa, synthetic construct
EVYRGDFNNT

SEQ ID NO: 147997 - protein, 10 aa, synthetic construct
EWARGDFNNT

SEQ ID NO: 147998 - protein, 10 aa, synthetic construct
EWDRGDFNNT

SEQ ID NO: 147999 - protein, 10 aa, synthetic construct
EWERGDFNNT

SEQ ID NO: 148000 - protein, 10 aa, synthetic construct
EWNRGDFNNT

SEQ ID NO: 148001 - protein, 10 aa, synthetic construct
EWQRGDFNNT

SEQ ID NO: 148002 - protein, 10 aa, synthetic construct
EWSRGDFNNT

SEQ ID NO: 148003 - protein, 10 aa, synthetic construct
EWTRGDFNNT

SEQ ID NO: 148004 - protein, 10 aa, synthetic construct
EWFRGDFNNT

SEQ ID NO: 148005 - protein, 10 aa, synthetic construct
EWGRGDFNNT

SEQ ID NO: 148006 - protein, 10 aa, synthetic construct
EWHRGDFNNT

SEQ ID NO: 148007 - protein, 10 aa, synthetic construct
EWIRGDFNNT

SEQ ID NO: 148008 - protein, 10 aa, synthetic construct
EWKRGDFNNT

SEQ ID NO: 148009 - protein, 10 aa, synthetic construct
EWLRGDFNNT

SEQ ID NO: 148010 - protein, 10 aa, synthetic construct
EWMRGDFNNT

SEQ ID NO: 148011 - protein, 10 aa, synthetic construct
EWPRGDFNNT

SEQ ID NO: 148012 - protein, 10 aa, synthetic construct
EWRRGDFNNT

SEQ ID NO: 148013 - protein, 10 aa, synthetic construct
EWVRGDFNNT

SEQ ID NO: 148014 - protein, 10 aa, synthetic construct
EWWRGDFNNT

SEQ ID NO: 148015 - protein, 10 aa, synthetic construct
EWYRGDFNNT

SEQ ID NO: 148016 - protein, 10 aa, synthetic construct
EYARGDFNNT

SEQ ID NO: 148017 - protein, 10 aa, synthetic construct
EYDRGDFNNT

SEQ ID NO: 148018 - protein, 10 aa, synthetic construct
EYERGDFNNT

SEQ ID NO: 148019 - protein, 10 aa, synthetic construct
EYNRGDFNNT

SEQ ID NO: 148020 - protein, 10 aa, synthetic construct
EYQRGDFNNT

SEQ ID NO: 148021 - protein, 10 aa, synthetic construct
EYSRGDFNNT

SEQ ID NO: 148022 - protein, 10 aa, synthetic construct
EYTRGDFNNT

SEQ ID NO: 148023 - protein, 10 aa, synthetic construct
EYFRGDFNNT

SEQ ID NO: 148024 - protein, 10 aa, synthetic construct
EYGRGDFNNT

SEQ ID NO: 148025 - protein, 10 aa, synthetic construct
EYHRGDFNNT

SEQ ID NO: 148026 - protein, 10 aa, synthetic construct
EYIRGDFNNT

SEQ ID NO: 148027 - protein, 10 aa, synthetic construct
EYKRGDFNNT

SEQ ID NO: 148028 - protein, 10 aa, synthetic construct
EYLRGDFNNT

SEQ ID NO: 148029 - protein, 10 aa, synthetic construct
EYMRGDFNNT

SEQ ID NO: 148030 - protein, 10 aa, synthetic construct
EYPRGDFNNT

SEQ ID NO: 148031 - protein, 10 aa, synthetic construct
EYRRGDFNNT

SEQ ID NO: 148032 - protein, 10 aa, synthetic construct
EYVRGDFNNT

SEQ ID NO: 148033 - protein, 10 aa, synthetic construct
EYWRGDFNNT

SEQ ID NO: 148034 - protein, 10 aa, synthetic construct
EYYRGDFNNT

SEQ ID NO: 148035 - protein, 10 aa, synthetic construct
NAARGDFNNT

SEQ ID NO: 148036 - protein, 10 aa, synthetic construct
NADRGDFNNT

SEQ ID NO: 148037 - protein, 10 aa, synthetic construct
NAERGDFNNT

SEQ ID NO: 148038 - protein, 10 aa, synthetic construct
NANRGDFNNT

SEQ ID NO: 148039 - protein, 10 aa, synthetic construct
NAQRGDFNNT

SEQ ID NO: 148040 - protein, 10 aa, synthetic construct
NASRGDFNNT

SEQ ID NO: 148041 - protein, 10 aa, synthetic construct
NATRGDFNNT

SEQ ID NO: 148042 - protein, 10 aa, synthetic construct
NAFRGDFNNT

SEQ ID NO: 148043 - protein, 10 aa, synthetic construct
NAGRGDFNNT

SEQ ID NO: 148044 - protein, 10 aa, synthetic construct
NAHRGDFNNT

SEQ ID NO: 148045 - protein, 10 aa, synthetic construct
NAIRGDFNNT

SEQ ID NO: 148046 - protein, 10 aa, synthetic construct
NAKRGDFNNT

SEQ ID NO: 148047 - protein, 10 aa, synthetic construct
NALRGDFNNT

SEQ ID NO: 148048 - protein, 10 aa, synthetic construct
NAMRGDFNNT

SEQ ID NO: 148049 - protein, 10 aa, synthetic construct
NAPRGDFNNT

SEQ ID NO: 148050 - protein, 10 aa, synthetic construct
NARRGDFNNT

SEQ ID NO: 148051 - protein, 10 aa, synthetic construct
NAVRGDFNNT

SEQ ID NO: 148052 - protein, 10 aa, synthetic construct
NAWRGDFNNT

SEQ ID NO: 148053 - protein, 10 aa, synthetic construct
NAYRGDFNNT

SEQ ID NO: 148054 - protein, 10 aa, synthetic construct
NDARGDFNNT

SEQ ID NO: 148055 - protein, 10 aa, synthetic construct
NDDRGDFNNT

SEQ ID NO: 148056 - protein, 10 aa, synthetic construct
NDERGDFNNT

SEQ ID NO: 148057 - protein, 10 aa, synthetic construct
NDNRGDFNNT

SEQ ID NO: 148058 - protein, 10 aa, synthetic construct
NDQRGDFNNT

SEQ ID NO: 148059 - protein, 10 aa, synthetic construct
NDSRGDFNNT

SEQ ID NO: 148060 - protein, 10 aa, synthetic construct
NDTRGDFNNT

SEQ ID NO: 148061 - protein, 10 aa, synthetic construct
NDFRGDFNNT

SEQ ID NO: 148062 - protein, 10 aa, synthetic construct
NDGRGDFNNT

SEQ ID NO: 148063 - protein, 10 aa, synthetic construct
NDHRGDFNNT

SEQ ID NO: 148064 - protein, 10 aa, synthetic construct
NDIRGDFNNT

SEQ ID NO: 148065 - protein, 10 aa, synthetic construct
NDKRGDFNNT

SEQ ID NO: 148066 - protein, 10 aa, synthetic construct
NDLRGDFNNT

SEQ ID NO: 148067 - protein, 10 aa, synthetic construct
NDMRGDFNNT

SEQ ID NO: 148068 - protein, 10 aa, synthetic construct
NDPRGDFNNT

SEQ ID NO: 148069 - protein, 10 aa, synthetic construct
NDRRGDFNNT

SEQ ID NO: 148070 - protein, 10 aa, synthetic construct
NDVRGDFNNT

SEQ ID NO: 148071 - protein, 10 aa, synthetic construct
NDWRGDFNNT

SEQ ID NO: 148072 - protein, 10 aa, synthetic construct
NDYRGDFNNT

SEQ ID NO: 148073 - protein, 10 aa, synthetic construct
NEARGDFNNT

SEQ ID NO: 148074 - protein, 10 aa, synthetic construct
NEDRGDFNNT

SEQ ID NO: 148075 - protein, 10 aa, synthetic construct
NEERGDFNNT

SEQ ID NO: 148076 - protein, 10 aa, synthetic construct
NENRGDFNNT

SEQ ID NO: 148077 - protein, 10 aa, synthetic construct
NEQRGDFNNT

SEQ ID NO: 148078 - protein, 10 aa, synthetic construct
NESRGDFNNT

SEQ ID NO: 148079 - protein, 10 aa, synthetic construct
NETRGDFNNT

SEQ ID NO: 148080 - protein, 10 aa, synthetic construct
NEFRGDFNNT

SEQ ID NO: 148081 - protein, 10 aa, synthetic construct
NEGRGDFNNT

SEQ ID NO: 148082 - protein, 10 aa, synthetic construct
NEHRGDFNNT

SEQ ID NO: 148083 - protein, 10 aa, synthetic construct
NEIRGDFNNT

SEQ ID NO: 148084 - protein, 10 aa, synthetic construct
NEKRGDFNNT

SEQ ID NO: 148085 - protein, 10 aa, synthetic construct
NELRGDFNNT

SEQ ID NO: 148086 - protein, 10 aa, synthetic construct
NEMRGDFNNT

SEQ ID NO: 148087 - protein, 10 aa, synthetic construct
NEPRGDFNNT

SEQ ID NO: 148088 - protein, 10 aa, synthetic construct
NERRGDFNNT

SEQ ID NO: 148089 - protein, 10 aa, synthetic construct
NEVRGDFNNT

SEQ ID NO: 148090 - protein, 10 aa, synthetic construct
NEWRGDFNNT

SEQ ID NO: 148091 - protein, 10 aa, synthetic construct
NEYRGDFNNT

SEQ ID NO: 148092 - protein, 10 aa, synthetic construct
NNARGDFNNT

SEQ ID NO: 148093 - protein, 10 aa, synthetic construct
NNDRGDFNNT

SEQ ID NO: 148094 - protein, 10 aa, synthetic construct
NNERGDFNNT

SEQ ID NO: 148095 - protein, 10 aa, synthetic construct
NNNRGDFNNT

SEQ ID NO: 148096 - protein, 10 aa, synthetic construct
NNQRGDFNNT

SEQ ID NO: 148097 - protein, 10 aa, synthetic construct
NNSRGDFNNT

SEQ ID NO: 148098 - protein, 10 aa, synthetic construct
NNTRGDFNNT

SEQ ID NO: 148099 - protein, 10 aa, synthetic construct
NNFRGDFNNT

SEQ ID NO: 148100 - protein, 10 aa, synthetic construct
NNGRGDFNNT

SEQ ID NO: 148101 - protein, 10 aa, synthetic construct
NNHRGDFNNT

SEQ ID NO: 148102 - protein, 10 aa, synthetic construct
NNIRGDFNNT

SEQ ID NO: 148103 - protein, 10 aa, synthetic construct
NNKRGDFNNT

SEQ ID NO: 148104 - protein, 10 aa, synthetic construct
NNLRGDFNNT

SEQ ID NO: 148105 - protein, 10 aa, synthetic construct
NNMRGDFNNT

SEQ ID NO: 148106 - protein, 10 aa, synthetic construct
NNPRGDFNNT

SEQ ID NO: 148107 - protein, 10 aa, synthetic construct
NNRRGDFNNT

SEQ ID NO: 148108 - protein, 10 aa, synthetic construct
NNVRGDFNNT

SEQ ID NO: 148109 - protein, 10 aa, synthetic construct
NNWRGDFNNT

SEQ ID NO: 148110 - protein, 10 aa, synthetic construct
NNYRGDFNNT

SEQ ID NO: 148111 - protein, 10 aa, synthetic construct
NQARGDFNNT

SEQ ID NO: 148112 - protein, 10 aa, synthetic construct
NQDRGDFNNT

SEQ ID NO: 148113 - protein, 10 aa, synthetic construct
NQERGDFNNT

SEQ ID NO: 148114 - protein, 10 aa, synthetic construct
NQNRGDFNNT

SEQ ID NO: 148115 - protein, 10 aa, synthetic construct
NQQRGDFNNT

SEQ ID NO: 148116 - protein, 10 aa, synthetic construct
NQSRGDFNNT

SEQ ID NO: 148117 - protein, 10 aa, synthetic construct
NQTRGDFNNT

SEQ ID NO: 148118 - protein, 10 aa, synthetic construct
NQFRGDFNNT

SEQ ID NO: 148119 - protein, 10 aa, synthetic construct
NQGRGDFNNT

SEQ ID NO: 148120 - protein, 10 aa, synthetic construct
NQHRGDFNNT

SEQ ID NO: 148121 - protein, 10 aa, synthetic construct
NQIRGDFNNT

SEQ ID NO: 148122 - protein, 10 aa, synthetic construct
NQKRGDFNNT

SEQ ID NO: 148123 - protein, 10 aa, synthetic construct
NQLRGDFNNT

SEQ ID NO: 148124 - protein, 10 aa, synthetic construct
NQMRGDFNNT

SEQ ID NO: 148125 - protein, 10 aa, synthetic construct
NQPRGDFNNT

SEQ ID NO: 148126 - protein, 10 aa, synthetic construct
NQRRGDFNNT

SEQ ID NO: 148127 - protein, 10 aa, synthetic construct
NQVRGDFNNT

SEQ ID NO: 148128 - protein, 10 aa, synthetic construct
NQWRGDFNNT

SEQ ID NO: 148129 - protein, 10 aa, synthetic construct
NQYRGDFNNT

SEQ ID NO: 148130 - protein, 10 aa, synthetic construct
NSARGDFNNT

SEQ ID NO: 148131 - protein, 10 aa, synthetic construct
NSDRGDFNNT

SEQ ID NO: 148132 - protein, 10 aa, synthetic construct
NSERGDFNNT

SEQ ID NO: 148133 - protein, 10 aa, synthetic construct
NSNRGDFNNT

SEQ ID NO: 148134 - protein, 10 aa, synthetic construct
NSQRGDFNNT

SEQ ID NO: 148135 - protein, 10 aa, synthetic construct
NSSRGDFNNT

SEQ ID NO: 148136 - protein, 10 aa, synthetic construct
NSTRGDFNNT

SEQ ID NO: 148137 - protein, 10 aa, synthetic construct
NSFRGDFNNT

SEQ ID NO: 148138 - protein, 10 aa, synthetic construct
NSGRGDFNNT

SEQ ID NO: 148139 - protein, 10 aa, synthetic construct
NSHRGDFNNT

SEQ ID NO: 148140 - protein, 10 aa, synthetic construct
NSIRGDFNNT

SEQ ID NO: 148141 - protein, 10 aa, synthetic construct
NSKRGDFNNT

SEQ ID NO: 148142 - protein, 10 aa, synthetic construct
NSLRGDFNNT

SEQ ID NO: 148143 - protein, 10 aa, synthetic construct
NSMRGDFNNT

SEQ ID NO: 148144 - protein, 10 aa, synthetic construct
NSPRGDFNNT

SEQ ID NO: 148145 - protein, 10 aa, synthetic construct
NSRRGDFNNT

SEQ ID NO: 148146 - protein, 10 aa, synthetic construct
NSVRGDFNNT

SEQ ID NO: 148147 - protein, 10 aa, synthetic construct
NSWRGDFNNT

SEQ ID NO: 148148 - protein, 10 aa, synthetic construct
NSYRGDFNNT

SEQ ID NO: 148149 - protein, 10 aa, synthetic construct
NTARGDFNNT

SEQ ID NO: 148150 - protein, 10 aa, synthetic construct
NTDRGDFNNT

SEQ ID NO: 148151 - protein, 10 aa, synthetic construct
NTERGDFNNT

SEQ ID NO: 148152 - protein, 10 aa, synthetic construct
NTNRGDFNNT

SEQ ID NO: 148153 - protein, 10 aa, synthetic construct
NTQRGDFNNT

SEQ ID NO: 148154 - protein, 10 aa, synthetic construct
NTSRGDFNNT

SEQ ID NO: 148155 - protein, 10 aa, synthetic construct
NTTRGDFNNT

SEQ ID NO: 148156 - protein, 10 aa, synthetic construct
NTFRGDFNNT

SEQ ID NO: 148157 - protein, 10 aa, synthetic construct
NTGRGDFNNT

SEQ ID NO: 148158 - protein, 10 aa, synthetic construct
NTHRGDFNNT

SEQ ID NO: 148159 - protein, 10 aa, synthetic construct
NTIRGDFNNT

SEQ ID NO: 148160 - protein, 10 aa, synthetic construct
NTKRGDFNNT

SEQ ID NO: 148161 - protein, 10 aa, synthetic construct
NTLRGDFNNT

SEQ ID NO: 148162 - protein, 10 aa, synthetic construct
NTMRGDFNNT

SEQ ID NO: 148163 - protein, 10 aa, synthetic construct
NTPRGDFNNT

SEQ ID NO: 148164 - protein, 10 aa, synthetic construct
NTRRGDFNNT

SEQ ID NO: 148165 - protein, 10 aa, synthetic construct
NTVRGDFNNT

SEQ ID NO: 148166 - protein, 10 aa, synthetic construct
NTWRGDFNNT

SEQ ID NO: 148167 - protein, 10 aa, synthetic construct
NTYRGDFNNT

SEQ ID NO: 148168 - protein, 10 aa, synthetic construct
NFARGDFNNT

SEQ ID NO: 148169 - protein, 10 aa, synthetic construct
NFDRGDFNNT

SEQ ID NO: 148170 - protein, 10 aa, synthetic construct
NFERGDFNNT

SEQ ID NO: 148171 - protein, 10 aa, synthetic construct
NFNRGDFNNT

SEQ ID NO: 148172 - protein, 10 aa, synthetic construct
NFQRGDFNNT

SEQ ID NO: 148173 - protein, 10 aa, synthetic construct
NFSRGDFNNT

SEQ ID NO: 148174 - protein, 10 aa, synthetic construct
NFTRGDFNNT

SEQ ID NO: 148175 - protein, 10 aa, synthetic construct
NFFRGDFNNT

SEQ ID NO: 148176 - protein, 10 aa, synthetic construct
NFGRGDFNNT

SEQ ID NO: 148177 - protein, 10 aa, synthetic construct
NFHRGDFNNT

SEQ ID NO: 148178 - protein, 10 aa, synthetic construct
NFIRGDFNNT

SEQ ID NO: 148179 - protein, 10 aa, synthetic construct
NFKRGDFNNT

SEQ ID NO: 148180 - protein, 10 aa, synthetic construct
NFLRGDFNNT

SEQ ID NO: 148181 - protein, 10 aa, synthetic construct
NFMRGDFNNT

SEQ ID NO: 148182 - protein, 10 aa, synthetic construct
NFPRGDFNNT

SEQ ID NO: 148183 - protein, 10 aa, synthetic construct
NFRRGDFNNT

SEQ ID NO: 148184 - protein, 10 aa, synthetic construct
NFVRGDFNNT

SEQ ID NO: 148185 - protein, 10 aa, synthetic construct
NFWRGDFNNT

SEQ ID NO: 148186 - protein, 10 aa, synthetic construct
NFYRGDFNNT

SEQ ID NO: 148187 - protein, 10 aa, synthetic construct
NGARGDFNNT

SEQ ID NO: 148188 - protein, 10 aa, synthetic construct
NGDRGDFNNT

SEQ ID NO: 148189 - protein, 10 aa, synthetic construct
NGERGDFNNT

SEQ ID NO: 148190 - protein, 10 aa, synthetic construct
NGNRGDFNNT

SEQ ID NO: 148191 - protein, 10 aa, synthetic construct
NGQRGDFNNT

SEQ ID NO: 148192 - protein, 10 aa, synthetic construct
NGSRGDFNNT

SEQ ID NO: 148193 - protein, 10 aa, synthetic construct
NGTRGDFNNT

SEQ ID NO: 148194 - protein, 10 aa, synthetic construct
NGFRGDFNNT

SEQ ID NO: 148195 - protein, 10 aa, synthetic construct
NGGRGDFNNT

SEQ ID NO: 148196 - protein, 10 aa, synthetic construct
NGHRGDFNNT

SEQ ID NO: 148197 - protein, 10 aa, synthetic construct
NGIRGDFNNT

SEQ ID NO: 148198 - protein, 10 aa, synthetic construct
NGKRGDFNNT

SEQ ID NO: 148199 - protein, 10 aa, synthetic construct
NGLRGDFNNT

SEQ ID NO: 148200 - protein, 10 aa, synthetic construct
NGMRGDFNNT

SEQ ID NO: 148201 - protein, 10 aa, synthetic construct
NGPRGDFNNT

SEQ ID NO: 148202 - protein, 10 aa, synthetic construct
NGRRGDFNNT

SEQ ID NO: 148203 - protein, 10 aa, synthetic construct
NGVRGDFNNT

SEQ ID NO: 148204 - protein, 10 aa, synthetic construct
NGWRGDFNNT

SEQ ID NO: 148205 - protein, 10 aa, synthetic construct
NGYRGDFNNT

SEQ ID NO: 148206 - protein, 10 aa, synthetic construct
NHARGDFNNT

SEQ ID NO: 148207 - protein, 10 aa, synthetic construct
NHDRGDFNNT

SEQ ID NO: 148208 - protein, 10 aa, synthetic construct
NHERGDFNNT

SEQ ID NO: 148209 - protein, 10 aa, synthetic construct
NHNRGDFNNT

SEQ ID NO: 148210 - protein, 10 aa, synthetic construct
NHQRGDFNNT

SEQ ID NO: 148211 - protein, 10 aa, synthetic construct
NHSRGDFNNT

SEQ ID NO: 148212 - protein, 10 aa, synthetic construct
NHTRGDFNNT

SEQ ID NO: 148213 - protein, 10 aa, synthetic construct
NHFRGDFNNT

SEQ ID NO: 148214 - protein, 10 aa, synthetic construct
NHGRGDFNNT

SEQ ID NO: 148215 - protein, 10 aa, synthetic construct
NHHRGDFNNT

SEQ ID NO: 148216 - protein, 10 aa, synthetic construct
NHIRGDFNNT

SEQ ID NO: 148217 - protein, 10 aa, synthetic construct
NHKRGDFNNT

SEQ ID NO: 148218 - protein, 10 aa, synthetic construct
NHLRGDFNNT

SEQ ID NO: 148219 - protein, 10 aa, synthetic construct
NHMRGDFNNT

SEQ ID NO: 148220 - protein, 10 aa, synthetic construct
NHPRGDFNNT

SEQ ID NO: 148221 - protein, 10 aa, synthetic construct
NHRRGDFNNT

SEQ ID NO: 148222 - protein, 10 aa, synthetic construct
NHVRGDFNNT

SEQ ID NO: 148223 - protein, 10 aa, synthetic construct
NHWRGDFNNT

SEQ ID NO: 148224 - protein, 10 aa, synthetic construct
NHYRGDFNNT

SEQ ID NO: 148225 - protein, 10 aa, synthetic construct
NIARGDFNNT

SEQ ID NO: 148226 - protein, 10 aa, synthetic construct
NIDRGDFNNT

SEQ ID NO: 148227 - protein, 10 aa, synthetic construct
NIERGDFNNT

SEQ ID NO: 148228 - protein, 10 aa, synthetic construct
NINRGDFNNT

SEQ ID NO: 148229 - protein, 10 aa, synthetic construct
NIQRGDFNNT

SEQ ID NO: 148230 - protein, 10 aa, synthetic construct
NISRGDFNNT

SEQ ID NO: 148231 - protein, 10 aa, synthetic construct
NITRGDFNNT

SEQ ID NO: 148232 - protein, 10 aa, synthetic construct
NIFRGDFNNT

SEQ ID NO: 148233 - protein, 10 aa, synthetic construct
NIGRGDFNNT

SEQ ID NO: 148234 - protein, 10 aa, synthetic construct
NIHRGDFNNT

SEQ ID NO: 148235 - protein, 10 aa, synthetic construct
NIIRGDFNNT

SEQ ID NO: 148236 - protein, 10 aa, synthetic construct
NIKRGDFNNT

SEQ ID NO: 148237 - protein, 10 aa, synthetic construct
NILRGDFNNT

SEQ ID NO: 148238 - protein, 10 aa, synthetic construct
NIMRGDFNNT

SEQ ID NO: 148239 - protein, 10 aa, synthetic construct
NIPRGDFNNT

SEQ ID NO: 148240 - protein, 10 aa, synthetic construct
NIRRGDFNNT

SEQ ID NO: 148241 - protein, 10 aa, synthetic construct
NIVRGDFNNT

SEQ ID NO: 148242 - protein, 10 aa, synthetic construct
NIWRGDFNNT

SEQ ID NO: 148243 - protein, 10 aa, synthetic construct
NIYRGDFNNT

SEQ ID NO: 148244 - protein, 10 aa, synthetic construct
NKARGDFNNT

SEQ ID NO: 148245 - protein, 10 aa, synthetic construct
NKDRGDFNNT

SEQ ID NO: 148246 - protein, 10 aa, synthetic construct
NKERGDFNNT

SEQ ID NO: 148247 - protein, 10 aa, synthetic construct
NKNRGDFNNT

SEQ ID NO: 148248 - protein, 10 aa, synthetic construct
NKQRGDFNNT

SEQ ID NO: 148249 - protein, 10 aa, synthetic construct
NKSRGDFNNT

SEQ ID NO: 148250 - protein, 10 aa, synthetic construct
NKTRGDFNNT

SEQ ID NO: 148251 - protein, 10 aa, synthetic construct
NKFRGDFNNT

SEQ ID NO: 148252 - protein, 10 aa, synthetic construct
NKGRGDFNNT

SEQ ID NO: 148253 - protein, 10 aa, synthetic construct
NKHRGDFNNT

SEQ ID NO: 148254 - protein, 10 aa, synthetic construct
NKIRGDFNNT

SEQ ID NO: 148255 - protein, 10 aa, synthetic construct
NKKRGDFNNT

SEQ ID NO: 148256 - protein, 10 aa, synthetic construct
NKLRGDFNNT

SEQ ID NO: 148257 - protein, 10 aa, synthetic construct
NKMRGDFNNT

SEQ ID NO: 148258 - protein, 10 aa, synthetic construct
NKPRGDFNNT

SEQ ID NO: 148259 - protein, 10 aa, synthetic construct
NKRRGDFNNT

SEQ ID NO: 148260 - protein, 10 aa, synthetic construct
NKVRGDFNNT

SEQ ID NO: 148261 - protein, 10 aa, synthetic construct
NKWRGDFNNT

SEQ ID NO: 148262 - protein, 10 aa, synthetic construct
NKYRGDFNNT

SEQ ID NO: 148263 - protein, 10 aa, synthetic construct
NLARGDFNNT

SEQ ID NO: 148264 - protein, 10 aa, synthetic construct
NLDRGDFNNT

SEQ ID NO: 148265 - protein, 10 aa, synthetic construct
NLERGDFNNT

SEQ ID NO: 148266 - protein, 10 aa, synthetic construct
NLNRGDFNNT

SEQ ID NO: 148267 - protein, 10 aa, synthetic construct
NLQRGDFNNT

SEQ ID NO: 148268 - protein, 10 aa, synthetic construct
NLSRGDFNNT

SEQ ID NO: 148269 - protein, 10 aa, synthetic construct
NLTRGDFNNT

SEQ ID NO: 148270 - protein, 10 aa, synthetic construct
NLFRGDFNNT

SEQ ID NO: 148271 - protein, 10 aa, synthetic construct
NLGRGDFNNT

SEQ ID NO: 148272 - protein, 10 aa, synthetic construct
NLHRGDFNNT

SEQ ID NO: 148273 - protein, 10 aa, synthetic construct
NLIRGDFNNT

SEQ ID NO: 148274 - protein, 10 aa, synthetic construct
NLKRGDFNNT

SEQ ID NO: 148275 - protein, 10 aa, synthetic construct
NLLRGDFNNT

SEQ ID NO: 148276 - protein, 10 aa, synthetic construct
NLMRGDFNNT

SEQ ID NO: 148277 - protein, 10 aa, synthetic construct
NLPRGDFNNT

SEQ ID NO: 148278 - protein, 10 aa, synthetic construct
NLRRGDFNNT

SEQ ID NO: 148279 - protein, 10 aa, synthetic construct
NLVRGDFNNT

SEQ ID NO: 148280 - protein, 10 aa, synthetic construct
NLWRGDFNNT

SEQ ID NO: 148281 - protein, 10 aa, synthetic construct
NLYRGDFNNT

SEQ ID NO: 148282 - protein, 10 aa, synthetic construct
NMARGDFNNT

SEQ ID NO: 148283 - protein, 10 aa, synthetic construct
NMDRGDFNNT

SEQ ID NO: 148284 - protein, 10 aa, synthetic construct
NMERGDFNNT

SEQ ID NO: 148285 - protein, 10 aa, synthetic construct
NMNRGDFNNT

SEQ ID NO: 148286 - protein, 10 aa, synthetic construct
NMQRGDFNNT

SEQ ID NO: 148287 - protein, 10 aa, synthetic construct
NMSRGDFNNT

SEQ ID NO: 148288 - protein, 10 aa, synthetic construct
NMTRGDFNNT

SEQ ID NO: 148289 - protein, 10 aa, synthetic construct
NMFRGDFNNT

SEQ ID NO: 148290 - protein, 10 aa, synthetic construct
NMGRGDFNNT

SEQ ID NO: 148291 - protein, 10 aa, synthetic construct
NMHRGDFNNT

SEQ ID NO: 148292 - protein, 10 aa, synthetic construct
NMIRGDFNNT

SEQ ID NO: 148293 - protein, 10 aa, synthetic construct
NMKRGDFNNT

SEQ ID NO: 148294 - protein, 10 aa, synthetic construct
NMLRGDFNNT

SEQ ID NO: 148295 - protein, 10 aa, synthetic construct
NMMRGDFNNT

SEQ ID NO: 148296 - protein, 10 aa, synthetic construct
NMPRGDFNNT

SEQ ID NO: 148297 - protein, 10 aa, synthetic construct
NMRRGDFNNT

SEQ ID NO: 148298 - protein, 10 aa, synthetic construct
NMVRGDFNNT

SEQ ID NO: 148299 - protein, 10 aa, synthetic construct
NMWRGDFNNT

SEQ ID NO: 148300 - protein, 10 aa, synthetic construct
NMYRGDFNNT

SEQ ID NO: 148301 - protein, 10 aa, synthetic construct
NPARGDFNNT

SEQ ID NO: 148302 - protein, 10 aa, synthetic construct
NPDRGDFNNT

SEQ ID NO: 148303 - protein, 10 aa, synthetic construct
NPERGDFNNT

SEQ ID NO: 148304 - protein, 10 aa, synthetic construct
NPNRGDFNNT

SEQ ID NO: 148305 - protein, 10 aa, synthetic construct
NPQRGDFNNT

SEQ ID NO: 148306 - protein, 10 aa, synthetic construct
NPSRGDFNNT

SEQ ID NO: 148307 - protein, 10 aa, synthetic construct
NPTRGDFNNT

SEQ ID NO: 148308 - protein, 10 aa, synthetic construct
NPFRGDFNNT

SEQ ID NO: 148309 - protein, 10 aa, synthetic construct
NPGRGDFNNT

SEQ ID NO: 148310 - protein, 10 aa, synthetic construct
NPHRGDFNNT

SEQ ID NO: 148311 - protein, 10 aa, synthetic construct
NPIRGDFNNT

SEQ ID NO: 148312 - protein, 10 aa, synthetic construct
NPKRGDFNNT

SEQ ID NO: 148313 - protein, 10 aa, synthetic construct
NPLRGDFNNT

SEQ ID NO: 148314 - protein, 10 aa, synthetic construct
NPMRGDFNNT

SEQ ID NO: 148315 - protein, 10 aa, synthetic construct
NPPRGDFNNT

SEQ ID NO: 148316 - protein, 10 aa, synthetic construct
NPRRGDFNNT

SEQ ID NO: 148317 - protein, 10 aa, synthetic construct
NPVRGDFNNT

SEQ ID NO: 148318 - protein, 10 aa, synthetic construct
NPWRGDFNNT

SEQ ID NO: 148319 - protein, 10 aa, synthetic construct
NPYRGDFNNT

SEQ ID NO: 148320 - protein, 10 aa, synthetic construct
NRARGDFNNT

SEQ ID NO: 148321 - protein, 10 aa, synthetic construct
NRDRGDFNNT

SEQ ID NO: 148322 - protein, 10 aa, synthetic construct
NRERGDFNNT

SEQ ID NO: 148323 - protein, 10 aa, synthetic construct
NRNRGDFNNT

SEQ ID NO: 148324 - protein, 10 aa, synthetic construct
NRQRGDFNNT

SEQ ID NO: 148325 - protein, 10 aa, synthetic construct
NRSRGDFNNT

SEQ ID NO: 148326 - protein, 10 aa, synthetic construct
NRTRGDFNNT

SEQ ID NO: 148327 - protein, 10 aa, synthetic construct
NRFRGDFNNT

SEQ ID NO: 148328 - protein, 10 aa, synthetic construct
NRGRGDFNNT

SEQ ID NO: 148329 - protein, 10 aa, synthetic construct
NRHRGDFNNT

SEQ ID NO: 148330 - protein, 10 aa, synthetic construct
NRIRGDFNNT

SEQ ID NO: 148331 - protein, 10 aa, synthetic construct
NRKRGDFNNT

SEQ ID NO: 148332 - protein, 10 aa, synthetic construct
NRLRGDFNNT

SEQ ID NO: 148333 - protein, 10 aa, synthetic construct
NRMRGDFNNT

SEQ ID NO: 148334 - protein, 10 aa, synthetic construct
NRPRGDFNNT

SEQ ID NO: 148335 - protein, 10 aa, synthetic construct
NRRRGDFNNT

SEQ ID NO: 148336 - protein, 10 aa, synthetic construct
NRVRGDFNNT

SEQ ID NO: 148337 - protein, 10 aa, synthetic construct
NRWRGDFNNT

SEQ ID NO: 148338 - protein, 10 aa, synthetic construct
NRYRGDFNNT

SEQ ID NO: 148339 - protein, 10 aa, synthetic construct
NVARGDFNNT

SEQ ID NO: 148340 - protein, 10 aa, synthetic construct
NVDRGDFNNT

SEQ ID NO: 148341 - protein, 10 aa, synthetic construct
NVERGDFNNT

SEQ ID NO: 148342 - protein, 10 aa, synthetic construct
NVNRGDFNNT

SEQ ID NO: 148343 - protein, 10 aa, synthetic construct
NVQRGDFNNT

SEQ ID NO: 148344 - protein, 10 aa, synthetic construct
NVSRGDFNNT

SEQ ID NO: 148345 - protein, 10 aa, synthetic construct
NVTRGDFNNT

SEQ ID NO: 148346 - protein, 10 aa, synthetic construct
NVFRGDFNNT

SEQ ID NO: 148347 - protein, 10 aa, synthetic construct
NVGRGDFNNT

SEQ ID NO: 148348 - protein, 10 aa, synthetic construct
NVHRGDFNNT

SEQ ID NO: 148349 - protein, 10 aa, synthetic construct
NVIRGDFNNT

SEQ ID NO: 148350 - protein, 10 aa, synthetic construct
NVKRGDFNNT

SEQ ID NO: 148351 - protein, 10 aa, synthetic construct
NVLRGDFNNT

SEQ ID NO: 148352 - protein, 10 aa, synthetic construct
NVMRGDFNNT

SEQ ID NO: 148353 - protein, 10 aa, synthetic construct
NVPRGDFNNT

SEQ ID NO: 148354 - protein, 10 aa, synthetic construct
NVRRGDFNNT

SEQ ID NO: 148355 - protein, 10 aa, synthetic construct
NVVRGDFNNT

SEQ ID NO: 148356 - protein, 10 aa, synthetic construct
NVWRGDFNNT

SEQ ID NO: 148357 - protein, 10 aa, synthetic construct
NVYRGDFNNT

SEQ ID NO: 148358 - protein, 10 aa, synthetic construct
NWARGDFNNT

SEQ ID NO: 148359 - protein, 10 aa, synthetic construct
NWDRGDFNNT

SEQ ID NO: 148360 - protein, 10 aa, synthetic construct
NWERGDFNNT

SEQ ID NO: 148361 - protein, 10 aa, synthetic construct
NWNRGDFNNT

SEQ ID NO: 148362 - protein, 10 aa, synthetic construct
NWQRGDFNNT

SEQ ID NO: 148363 - protein, 10 aa, synthetic construct
NWSRGDFNNT

SEQ ID NO: 148364 - protein, 10 aa, synthetic construct
NWTRGDFNNT

SEQ ID NO: 148365 - protein, 10 aa, synthetic construct
NWFRGDFNNT

SEQ ID NO: 148366 - protein, 10 aa, synthetic construct
NWGRGDFNNT

SEQ ID NO: 148367 - protein, 10 aa, synthetic construct
NWHRGDFNNT

SEQ ID NO: 148368 - protein, 10 aa, synthetic construct
NWIRGDFNNT

SEQ ID NO: 148369 - protein, 10 aa, synthetic construct
NWKRGDFNNT

SEQ ID NO: 148370 - protein, 10 aa, synthetic construct
NWLRGDFNNT

SEQ ID NO: 148371 - protein, 10 aa, synthetic construct
NWMRGDFNNT

SEQ ID NO: 148372 - protein, 10 aa, synthetic construct
NWPRGDFNNT

SEQ ID NO: 148373 - protein, 10 aa, synthetic construct
NWRRGDFNNT

SEQ ID NO: 148374 - protein, 10 aa, synthetic construct
NWVRGDFNNT

SEQ ID NO: 148375 - protein, 10 aa, synthetic construct
NWWRGDFNNT

SEQ ID NO: 148376 - protein, 10 aa, synthetic construct
NWYRGDFNNT

SEQ ID NO: 148377 - protein, 10 aa, synthetic construct
NYARGDFNNT

SEQ ID NO: 148378 - protein, 10 aa, synthetic construct
NYDRGDFNNT

SEQ ID NO: 148379 - protein, 10 aa, synthetic construct
NYERGDFNNT

SEQ ID NO: 148380 - protein, 10 aa, synthetic construct
NYNRGDFNNT

SEQ ID NO: 148381 - protein, 10 aa, synthetic construct
NYQRGDFNNT

SEQ ID NO: 148382 - protein, 10 aa, synthetic construct
NYSRGDFNNT

SEQ ID NO: 148383 - protein, 10 aa, synthetic construct
NYTRGDFNNT

SEQ ID NO: 148384 - protein, 10 aa, synthetic construct
NYFRGDFNNT

SEQ ID NO: 148385 - protein, 10 aa, synthetic construct
NYGRGDFNNT

SEQ ID NO: 148386 - protein, 10 aa, synthetic construct
NYHRGDFNNT

SEQ ID NO: 148387 - protein, 10 aa, synthetic construct
NYIRGDFNNT

SEQ ID NO: 148388 - protein, 10 aa, synthetic construct
NYKRGDFNNT

SEQ ID NO: 148389 - protein, 10 aa, synthetic construct
NYLRGDFNNT

SEQ ID NO: 148390 - protein, 10 aa, synthetic construct
NYMRGDFNNT

SEQ ID NO: 148391 - protein, 10 aa, synthetic construct
NYPRGDFNNT

SEQ ID NO: 148392 - protein, 10 aa, synthetic construct
NYRRGDFNNT

SEQ ID NO: 148393 - protein, 10 aa, synthetic construct
NYVRGDFNNT

SEQ ID NO: 148394 - protein, 10 aa, synthetic construct
NYWRGDFNNT

SEQ ID NO: 148395 - protein, 10 aa, synthetic construct
NYYRGDFNNT

SEQ ID NO: 148396 - protein, 10 aa, synthetic construct
QAARGDFNNT

SEQ ID NO: 148397 - protein, 10 aa, synthetic construct
QADRGDFNNT

SEQ ID NO: 148398 - protein, 10 aa, synthetic construct
QAERGDFNNT

SEQ ID NO: 148399 - protein, 10 aa, synthetic construct
QANRGDFNNT

SEQ ID NO: 148400 - protein, 10 aa, synthetic construct
QAQRGDFNNT

SEQ ID NO: 148401 - protein, 10 aa, synthetic construct
QASRGDFNNT

SEQ ID NO: 148402 - protein, 10 aa, synthetic construct
QATRGDFNNT

SEQ ID NO: 148403 - protein, 10 aa, synthetic construct
QAFRGDFNNT

SEQ ID NO: 148404 - protein, 10 aa, synthetic construct
QAGRGDFNNT

SEQ ID NO: 148405 - protein, 10 aa, synthetic construct
QAHRGDFNNT

SEQ ID NO: 148406 - protein, 10 aa, synthetic construct
QAIRGDFNNT

SEQ ID NO: 148407 - protein, 10 aa, synthetic construct
QAKRGDFNNT

SEQ ID NO: 148408 - protein, 10 aa, synthetic construct
QALRGDFNNT

SEQ ID NO: 148409 - protein, 10 aa, synthetic construct
QAMRGDFNNT

SEQ ID NO: 148410 - protein, 10 aa, synthetic construct
QAPRGDFNNT

SEQ ID NO: 148411 - protein, 10 aa, synthetic construct
QARRGDFNNT

SEQ ID NO: 148412 - protein, 10 aa, synthetic construct
QAVRGDFNNT

SEQ ID NO: 148413 - protein, 10 aa, synthetic construct
QAWRGDFNNT

SEQ ID NO: 148414 - protein, 10 aa, synthetic construct
QAYRGDFNNT

SEQ ID NO: 148415 - protein, 10 aa, synthetic construct
QDARGDFNNT

SEQ ID NO: 148416 - protein, 10 aa, synthetic construct
QDDRGDFNNT

SEQ ID NO: 148417 - protein, 10 aa, synthetic construct
QDERGDFNNT

SEQ ID NO: 148418 - protein, 10 aa, synthetic construct
QDNRGDFNNT

SEQ ID NO: 148419 - protein, 10 aa, synthetic construct
QDQRGDFNNT

SEQ ID NO: 148420 - protein, 10 aa, synthetic construct
QDSRGDFNNT

SEQ ID NO: 148421 - protein, 10 aa, synthetic construct
QDTRGDFNNT

SEQ ID NO: 148422 - protein, 10 aa, synthetic construct
QDFRGDFNNT

SEQ ID NO: 148423 - protein, 10 aa, synthetic construct
QDGRGDFNNT

SEQ ID NO: 148424 - protein, 10 aa, synthetic construct
QDHRGDFNNT

SEQ ID NO: 148425 - protein, 10 aa, synthetic construct
QDIRGDFNNT

SEQ ID NO: 148426 - protein, 10 aa, synthetic construct
QDKRGDFNNT

SEQ ID NO: 148427 - protein, 10 aa, synthetic construct
QDLRGDFNNT

SEQ ID NO: 148428 - protein, 10 aa, synthetic construct
QDMRGDFNNT

SEQ ID NO: 148429 - protein, 10 aa, synthetic construct
QDPRGDFNNT

SEQ ID NO: 148430 - protein, 10 aa, synthetic construct
QDRRGDFNNT

SEQ ID NO: 148431 - protein, 10 aa, synthetic construct
QDVRGDFNNT

SEQ ID NO: 148432 - protein, 10 aa, synthetic construct
QDWRGDFNNT

SEQ ID NO: 148433 - protein, 10 aa, synthetic construct
QDYRGDFNNT

SEQ ID NO: 148434 - protein, 10 aa, synthetic construct
QEARGDFNNT

SEQ ID NO: 148435 - protein, 10 aa, synthetic construct
QEDRGDFNNT

SEQ ID NO: 148436 - protein, 10 aa, synthetic construct
QEERGDFNNT

SEQ ID NO: 148437 - protein, 10 aa, synthetic construct
QENRGDFNNT

SEQ ID NO: 148438 - protein, 10 aa, synthetic construct
QEQRGDFNNT

SEQ ID NO: 148439 - protein, 10 aa, synthetic construct
QESRGDFNNT

SEQ ID NO: 148440 - protein, 10 aa, synthetic construct
QETRGDFNNT

SEQ ID NO: 148441 - protein, 10 aa, synthetic construct
QEFRGDFNNT

SEQ ID NO: 148442 - protein, 10 aa, synthetic construct
QEGRGDFNNT

SEQ ID NO: 148443 - protein, 10 aa, synthetic construct
QEHRGDFNNT

SEQ ID NO: 148444 - protein, 10 aa, synthetic construct
QEIRGDFNNT

SEQ ID NO: 148445 - protein, 10 aa, synthetic construct
QEKRGDFNNT

SEQ ID NO: 148446 - protein, 10 aa, synthetic construct
QELRGDFNNT

SEQ ID NO: 148447 - protein, 10 aa, synthetic construct
QEMRGDFNNT

SEQ ID NO: 148448 - protein, 10 aa, synthetic construct
QEPRGDFNNT

SEQ ID NO: 148449 - protein, 10 aa, synthetic construct
QERRGDFNNT

SEQ ID NO: 148450 - protein, 10 aa, synthetic construct
QEVRGDFNNT

SEQ ID NO: 148451 - protein, 10 aa, synthetic construct
QEWRGDFNNT

SEQ ID NO: 148452 - protein, 10 aa, synthetic construct
QEYRGDFNNT

SEQ ID NO: 148453 - protein, 10 aa, synthetic construct
QNARGDFNNT

SEQ ID NO: 148454 - protein, 10 aa, synthetic construct
QNDRGDFNNT

SEQ ID NO: 148455 - protein, 10 aa, synthetic construct
QNERGDFNNT

SEQ ID NO: 148456 - protein, 10 aa, synthetic construct
QNNRGDFNNT

SEQ ID NO: 148457 - protein, 10 aa, synthetic construct
QNQRGDFNNT

SEQ ID NO: 148458 - protein, 10 aa, synthetic construct
QNSRGDFNNT

SEQ ID NO: 148459 - protein, 10 aa, synthetic construct
QNTRGDFNNT

SEQ ID NO: 148460 - protein, 10 aa, synthetic construct
QNFRGDFNNT

SEQ ID NO: 148461 - protein, 10 aa, synthetic construct
QNGRGDFNNT

SEQ ID NO: 148462 - protein, 10 aa, synthetic construct
QNHRGDFNNT

SEQ ID NO: 148463 - protein, 10 aa, synthetic construct
QNIRGDFNNT

SEQ ID NO: 148464 - protein, 10 aa, synthetic construct
QNKRGDFNNT

SEQ ID NO: 148465 - protein, 10 aa, synthetic construct
QNLRGDFNNT

SEQ ID NO: 148466 - protein, 10 aa, synthetic construct
QNMRGDFNNT

SEQ ID NO: 148467 - protein, 10 aa, synthetic construct
QNPRGDFNNT

SEQ ID NO: 148468 - protein, 10 aa, synthetic construct
QNRRGDFNNT

SEQ ID NO: 148469 - protein, 10 aa, synthetic construct
QNVRGDFNNT

SEQ ID NO: 148470 - protein, 10 aa, synthetic construct
QNWRGDFNNT

SEQ ID NO: 148471 - protein, 10 aa, synthetic construct
QNYRGDFNNT

SEQ ID NO: 148472 - protein, 10 aa, synthetic construct
QQARGDFNNT

SEQ ID NO: 148473 - protein, 10 aa, synthetic construct
QQDRGDFNNT

SEQ ID NO: 148474 - protein, 10 aa, synthetic construct
QQERGDFNNT

SEQ ID NO: 148475 - protein, 10 aa, synthetic construct
QQNRGDFNNT

SEQ ID NO: 148476 - protein, 10 aa, synthetic construct
QQQRGDFNNT

SEQ ID NO: 148477 - protein, 10 aa, synthetic construct
QQSRGDFNNT

SEQ ID NO: 148478 - protein, 10 aa, synthetic construct
QQTRGDFNNT

SEQ ID NO: 148479 - protein, 10 aa, synthetic construct
QQFRGDFNNT

SEQ ID NO: 148480 - protein, 10 aa, synthetic construct
QQGRGDFNNT

SEQ ID NO: 148481 - protein, 10 aa, synthetic construct
QQHRGDFNNT

SEQ ID NO: 148482 - protein, 10 aa, synthetic construct
QQIRGDFNNT

SEQ ID NO: 148483 - protein, 10 aa, synthetic construct
QQKRGDFNNT

SEQ ID NO: 148484 - protein, 10 aa, synthetic construct
QQLRGDFNNT

SEQ ID NO: 148485 - protein, 10 aa, synthetic construct
QQMRGDFNNT

SEQ ID NO: 148486 - protein, 10 aa, synthetic construct
QQPRGDFNNT

SEQ ID NO: 148487 - protein, 10 aa, synthetic construct
QQRRGDFNNT

SEQ ID NO: 148488 - protein, 10 aa, synthetic construct
QQVRGDFNNT

SEQ ID NO: 148489 - protein, 10 aa, synthetic construct
QQWRGDFNNT

SEQ ID NO: 148490 - protein, 10 aa, synthetic construct
QQYRGDFNNT

SEQ ID NO: 148491 - protein, 10 aa, synthetic construct
QSARGDFNNT

SEQ ID NO: 148492 - protein, 10 aa, synthetic construct
QSDRGDFNNT

SEQ ID NO: 148493 - protein, 10 aa, synthetic construct
QSERGDFNNT

SEQ ID NO: 148494 - protein, 10 aa, synthetic construct
QSNRGDFNNT

SEQ ID NO: 148495 - protein, 10 aa, synthetic construct
QSQRGDFNNT

SEQ ID NO: 148496 - protein, 10 aa, synthetic construct
QSSRGDFNNT

SEQ ID NO: 148497 - protein, 10 aa, synthetic construct
QSTRGDFNNT

SEQ ID NO: 148498 - protein, 10 aa, synthetic construct
QSFRGDFNNT

SEQ ID NO: 148499 - protein, 10 aa, synthetic construct
QSGRGDFNNT

SEQ ID NO: 148500 - protein, 10 aa, synthetic construct
QSHRGDFNNT

SEQ ID NO: 148501 - protein, 10 aa, synthetic construct
QSIRGDFNNT

SEQ ID NO: 148502 - protein, 10 aa, synthetic construct
QSKRGDFNNT

SEQ ID NO: 148503 - protein, 10 aa, synthetic construct
QSLRGDFNNT

SEQ ID NO: 148504 - protein, 10 aa, synthetic construct
QSMRGDFNNT

SEQ ID NO: 148505 - protein, 10 aa, synthetic construct
QSPRGDFNNT

SEQ ID NO: 148506 - protein, 10 aa, synthetic construct
QSRRGDFNNT

SEQ ID NO: 148507 - protein, 10 aa, synthetic construct
QSVRGDFNNT

SEQ ID NO: 148508 - protein, 10 aa, synthetic construct
QSWRGDFNNT

SEQ ID NO: 148509 - protein, 10 aa, synthetic construct
QSYRGDFNNT

SEQ ID NO: 148510 - protein, 10 aa, synthetic construct
QTARGDFNNT

SEQ ID NO: 148511 - protein, 10 aa, synthetic construct
QTDRGDFNNT

SEQ ID NO: 148512 - protein, 10 aa, synthetic construct
QTERGDFNNT

SEQ ID NO: 148513 - protein, 10 aa, synthetic construct
QTNRGDFNNT

SEQ ID NO: 148514 - protein, 10 aa, synthetic construct
QTQRGDFNNT

SEQ ID NO: 148515 - protein, 10 aa, synthetic construct
QTSRGDFNNT

SEQ ID NO: 148516 - protein, 10 aa, synthetic construct
QTTRGDFNNT

SEQ ID NO: 148517 - protein, 10 aa, synthetic construct
QTFRGDFNNT

SEQ ID NO: 148518 - protein, 10 aa, synthetic construct
QTGRGDFNNT

SEQ ID NO: 148519 - protein, 10 aa, synthetic construct
QTHRGDFNNT

SEQ ID NO: 148520 - protein, 10 aa, synthetic construct
QTIRGDFNNT

SEQ ID NO: 148521 - protein, 10 aa, synthetic construct
QTKRGDFNNT

SEQ ID NO: 148522 - protein, 10 aa, synthetic construct
QTLRGDFNNT

SEQ ID NO: 148523 - protein, 10 aa, synthetic construct
QTMRGDFNNT

SEQ ID NO: 148524 - protein, 10 aa, synthetic construct
QTPRGDFNNT

SEQ ID NO: 148525 - protein, 10 aa, synthetic construct
QTRRGDFNNT

SEQ ID NO: 148526 - protein, 10 aa, synthetic construct
QTVRGDFNNT

SEQ ID NO: 148527 - protein, 10 aa, synthetic construct
QTWRGDFNNT

SEQ ID NO: 148528 - protein, 10 aa, synthetic construct
QTYRGDFNNT

SEQ ID NO: 148529 - protein, 10 aa, synthetic construct
QFARGDFNNT

SEQ ID NO: 148530 - protein, 10 aa, synthetic construct
QFDRGDFNNT

SEQ ID NO: 148531 - protein, 10 aa, synthetic construct
QFERGDFNNT

SEQ ID NO: 148532 - protein, 10 aa, synthetic construct
QFNRGDFNNT

SEQ ID NO: 148533 - protein, 10 aa, synthetic construct
QFQRGDFNNT

SEQ ID NO: 148534 - protein, 10 aa, synthetic construct
QFSRGDFNNT

SEQ ID NO: 148535 - protein, 10 aa, synthetic construct
QFTRGDFNNT

SEQ ID NO: 148536 - protein, 10 aa, synthetic construct
QFFRGDFNNT

SEQ ID NO: 148537 - protein, 10 aa, synthetic construct
QFGRGDFNNT

SEQ ID NO: 148538 - protein, 10 aa, synthetic construct
QFHRGDFNNT

SEQ ID NO: 148539 - protein, 10 aa, synthetic construct
QFIRGDFNNT

SEQ ID NO: 148540 - protein, 10 aa, synthetic construct
QFKRGDFNNT

SEQ ID NO: 148541 - protein, 10 aa, synthetic construct
QFLRGDFNNT

SEQ ID NO: 148542 - protein, 10 aa, synthetic construct
QFMRGDFNNT

SEQ ID NO: 148543 - protein, 10 aa, synthetic construct
QFPRGDFNNT

SEQ ID NO: 148544 - protein, 10 aa, synthetic construct
QFRRGDFNNT

SEQ ID NO: 148545 - protein, 10 aa, synthetic construct
QFVRGDFNNT

SEQ ID NO: 148546 - protein, 10 aa, synthetic construct
QFWRGDFNNT

SEQ ID NO: 148547 - protein, 10 aa, synthetic construct
QFYRGDFNNT

SEQ ID NO: 148548 - protein, 10 aa, synthetic construct
QGARGDFNNT

SEQ ID NO: 148549 - protein, 10 aa, synthetic construct
QGDRGDFNNT

SEQ ID NO: 148550 - protein, 10 aa, synthetic construct
QGERGDFNNT

SEQ ID NO: 148551 - protein, 10 aa, synthetic construct
QGNRGDFNNT

SEQ ID NO: 148552 - protein, 10 aa, synthetic construct
QGQRGDFNNT

SEQ ID NO: 148553 - protein, 10 aa, synthetic construct
QGSRGDFNNT

SEQ ID NO: 148554 - protein, 10 aa, synthetic construct
QGTRGDFNNT

SEQ ID NO: 148555 - protein, 10 aa, synthetic construct
QGFRGDFNNT

SEQ ID NO: 148556 - protein, 10 aa, synthetic construct
QGGRGDFNNT

SEQ ID NO: 148557 - protein, 10 aa, synthetic construct
QGHRGDFNNT

SEQ ID NO: 148558 - protein, 10 aa, synthetic construct
QGIRGDFNNT

SEQ ID NO: 148559 - protein, 10 aa, synthetic construct
QGKRGDFNNT

SEQ ID NO: 148560 - protein, 10 aa, synthetic construct
QGLRGDFNNT

SEQ ID NO: 148561 - protein, 10 aa, synthetic construct
QGMRGDFNNT

SEQ ID NO: 148562 - protein, 10 aa, synthetic construct
QGPRGDFNNT

SEQ ID NO: 148563 - protein, 10 aa, synthetic construct
QGRRGDFNNT

SEQ ID NO: 148564 - protein, 10 aa, synthetic construct
QGVRGDFNNT

SEQ ID NO: 148565 - protein, 10 aa, synthetic construct
QGWRGDFNNT

SEQ ID NO: 148566 - protein, 10 aa, synthetic construct
QGYRGDFNNT

SEQ ID NO: 148567 - protein, 10 aa, synthetic construct
QHARGDFNNT

SEQ ID NO: 148568 - protein, 10 aa, synthetic construct
QHDRGDFNNT

SEQ ID NO: 148569 - protein, 10 aa, synthetic construct
QHERGDFNNT

SEQ ID NO: 148570 - protein, 10 aa, synthetic construct
QHNRGDFNNT

SEQ ID NO: 148571 - protein, 10 aa, synthetic construct
QHQRGDFNNT

SEQ ID NO: 148572 - protein, 10 aa, synthetic construct
QHSRGDFNNT

SEQ ID NO: 148573 - protein, 10 aa, synthetic construct
QHTRGDFNNT

SEQ ID NO: 148574 - protein, 10 aa, synthetic construct
QHFRGDFNNT

SEQ ID NO: 148575 - protein, 10 aa, synthetic construct
QHGRGDFNNT

SEQ ID NO: 148576 - protein, 10 aa, synthetic construct
QHHRGDFNNT

SEQ ID NO: 148577 - protein, 10 aa, synthetic construct
QHIRGDFNNT

SEQ ID NO: 148578 - protein, 10 aa, synthetic construct
QHKRGDFNNT

SEQ ID NO: 148579 - protein, 10 aa, synthetic construct
QHLRGDFNNT

SEQ ID NO: 148580 - protein, 10 aa, synthetic construct
QHMRGDFNNT

SEQ ID NO: 148581 - protein, 10 aa, synthetic construct
QHPRGDFNNT

SEQ ID NO: 148582 - protein, 10 aa, synthetic construct
QHRRGDFNNT

SEQ ID NO: 148583 - protein, 10 aa, synthetic construct
QHVRGDFNNT

SEQ ID NO: 148584 - protein, 10 aa, synthetic construct
QHWRGDFNNT

SEQ ID NO: 148585 - protein, 10 aa, synthetic construct
QHYRGDFNNT

SEQ ID NO: 148586 - protein, 10 aa, synthetic construct
QIARGDFNNT

SEQ ID NO: 148587 - protein, 10 aa, synthetic construct
QIDRGDFNNT

SEQ ID NO: 148588 - protein, 10 aa, synthetic construct
QIERGDFNNT

SEQ ID NO: 148589 - protein, 10 aa, synthetic construct
QINRGDFNNT

SEQ ID NO: 148590 - protein, 10 aa, synthetic construct
QIQRGDFNNT

SEQ ID NO: 148591 - protein, 10 aa, synthetic construct
QISRGDFNNT

SEQ ID NO: 148592 - protein, 10 aa, synthetic construct
QITRGDFNNT

SEQ ID NO: 148593 - protein, 10 aa, synthetic construct
QIFRGDFNNT

SEQ ID NO: 148594 - protein, 10 aa, synthetic construct
QIGRGDFNNT

SEQ ID NO: 148595 - protein, 10 aa, synthetic construct
QIHRGDFNNT

SEQ ID NO: 148596 - protein, 10 aa, synthetic construct
QIIRGDFNNT

SEQ ID NO: 148597 - protein, 10 aa, synthetic construct
QIKRGDFNNT

SEQ ID NO: 148598 - protein, 10 aa, synthetic construct
QILRGDFNNT

SEQ ID NO: 148599 - protein, 10 aa, synthetic construct
QIMRGDFNNT

SEQ ID NO: 148600 - protein, 10 aa, synthetic construct
QIPRGDFNNT

SEQ ID NO: 148601 - protein, 10 aa, synthetic construct
QIRRGDFNNT

SEQ ID NO: 148602 - protein, 10 aa, synthetic construct
QIVRGDFNNT

SEQ ID NO: 148603 - protein, 10 aa, synthetic construct
QIWRGDFNNT

SEQ ID NO: 148604 - protein, 10 aa, synthetic construct
QIYRGDFNNT

SEQ ID NO: 148605 - protein, 10 aa, synthetic construct
QKARGDFNNT

SEQ ID NO: 148606 - protein, 10 aa, synthetic construct
QKDRGDFNNT

SEQ ID NO: 148607 - protein, 10 aa, synthetic construct
QKERGDFNNT

SEQ ID NO: 148608 - protein, 10 aa, synthetic construct
QKNRGDFNNT

SEQ ID NO: 148609 - protein, 10 aa, synthetic construct
QKQRGDFNNT

SEQ ID NO: 148610 - protein, 10 aa, synthetic construct
QKSRGDFNNT

SEQ ID NO: 148611 - protein, 10 aa, synthetic construct
QKTRGDFNNT

SEQ ID NO: 148612 - protein, 10 aa, synthetic construct
QKFRGDFNNT

SEQ ID NO: 148613 - protein, 10 aa, synthetic construct
QKGRGDFNNT

SEQ ID NO: 148614 - protein, 10 aa, synthetic construct
QKHRGDFNNT

SEQ ID NO: 148615 - protein, 10 aa, synthetic construct
QKIRGDFNNT

SEQ ID NO: 148616 - protein, 10 aa, synthetic construct
QKKRGDFNNT

SEQ ID NO: 148617 - protein, 10 aa, synthetic construct
QKLRGDFNNT

SEQ ID NO: 148618 - protein, 10 aa, synthetic construct
QKMRGDFNNT

SEQ ID NO: 148619 - protein, 10 aa, synthetic construct
QKPRGDFNNT

SEQ ID NO: 148620 - protein, 10 aa, synthetic construct
QKRRGDFNNT

SEQ ID NO: 148621 - protein, 10 aa, synthetic construct
QKVRGDFNNT

SEQ ID NO: 148622 - protein, 10 aa, synthetic construct
QKWRGDFNNT

SEQ ID NO: 148623 - protein, 10 aa, synthetic construct
QKYRGDFNNT

SEQ ID NO: 148624 - protein, 10 aa, synthetic construct
QLARGDFNNT

SEQ ID NO: 148625 - protein, 10 aa, synthetic construct
QLDRGDFNNT

SEQ ID NO: 148626 - protein, 10 aa, synthetic construct
QLERGDFNNT

SEQ ID NO: 148627 - protein, 10 aa, synthetic construct
QLNRGDFNNT

SEQ ID NO: 148628 - protein, 10 aa, synthetic construct
QLQRGDFNNT

SEQ ID NO: 148629 - protein, 10 aa, synthetic construct
QLSRGDFNNT

SEQ ID NO: 148630 - protein, 10 aa, synthetic construct
QLTRGDFNNT

SEQ ID NO: 148631 - protein, 10 aa, synthetic construct
QLFRGDFNNT

SEQ ID NO: 148632 - protein, 10 aa, synthetic construct
QLGRGDFNNT

SEQ ID NO: 148633 - protein, 10 aa, synthetic construct
QLHRGDFNNT

SEQ ID NO: 148634 - protein, 10 aa, synthetic construct
QLIRGDFNNT

SEQ ID NO: 148635 - protein, 10 aa, synthetic construct
QLKRGDFNNT

SEQ ID NO: 148636 - protein, 10 aa, synthetic construct
QLLRGDFNNT

SEQ ID NO: 148637 - protein, 10 aa, synthetic construct
QLMRGDFNNT

SEQ ID NO: 148638 - protein, 10 aa, synthetic construct
QLPRGDFNNT

SEQ ID NO: 148639 - protein, 10 aa, synthetic construct
QLRRGDFNNT

SEQ ID NO: 148640 - protein, 10 aa, synthetic construct
QLVRGDFNNT

SEQ ID NO: 148641 - protein, 10 aa, synthetic construct
QLWRGDFNNT

SEQ ID NO: 148642 - protein, 10 aa, synthetic construct
QLYRGDFNNT

SEQ ID NO: 148643 - protein, 10 aa, synthetic construct
QMARGDFNNT

SEQ ID NO: 148644 - protein, 10 aa, synthetic construct
QMDRGDFNNT

SEQ ID NO: 148645 - protein, 10 aa, synthetic construct
QMERGDFNNT

SEQ ID NO: 148646 - protein, 10 aa, synthetic construct
QMNRGDFNNT

SEQ ID NO: 148647 - protein, 10 aa, synthetic construct
QMQRGDFNNT

SEQ ID NO: 148648 - protein, 10 aa, synthetic construct
QMSRGDFNNT

SEQ ID NO: 148649 - protein, 10 aa, synthetic construct
QMTRGDFNNT

SEQ ID NO: 148650 - protein, 10 aa, synthetic construct
QMFRGDFNNT

SEQ ID NO: 148651 - protein, 10 aa, synthetic construct
QMGRGDFNNT

SEQ ID NO: 148652 - protein, 10 aa, synthetic construct
QMHRGDFNNT

SEQ ID NO: 148653 - protein, 10 aa, synthetic construct
QMIRGDFNNT

SEQ ID NO: 148654 - protein, 10 aa, synthetic construct
QMKRGDFNNT

SEQ ID NO: 148655 - protein, 10 aa, synthetic construct
QMLRGDFNNT

SEQ ID NO: 148656 - protein, 10 aa, synthetic construct
QMMRGDFNNT

SEQ ID NO: 148657 - protein, 10 aa, synthetic construct
QMPRGDFNNT

SEQ ID NO: 148658 - protein, 10 aa, synthetic construct
QMRRGDFNNT

SEQ ID NO: 148659 - protein, 10 aa, synthetic construct
QMVRGDFNNT

SEQ ID NO: 148660 - protein, 10 aa, synthetic construct
QMWRGDFNNT

SEQ ID NO: 148661 - protein, 10 aa, synthetic construct
QMYRGDFNNT

SEQ ID NO: 148662 - protein, 10 aa, synthetic construct
QPARGDFNNT

SEQ ID NO: 148663 - protein, 10 aa, synthetic construct
QPDRGDFNNT

SEQ ID NO: 148664 - protein, 10 aa, synthetic construct
QPERGDFNNT

SEQ ID NO: 148665 - protein, 10 aa, synthetic construct
QPNRGDFNNT

SEQ ID NO: 148666 - protein, 10 aa, synthetic construct
QPQRGDFNNT

SEQ ID NO: 148667 - protein, 10 aa, synthetic construct
QPSRGDFNNT

SEQ ID NO: 148668 - protein, 10 aa, synthetic construct
QPTRGDFNNT

SEQ ID NO: 148669 - protein, 10 aa, synthetic construct
QPFRGDFNNT

SEQ ID NO: 148670 - protein, 10 aa, synthetic construct
QPGRGDFNNT

SEQ ID NO: 148671 - protein, 10 aa, synthetic construct
QPHRGDFNNT

SEQ ID NO: 148672 - protein, 10 aa, synthetic construct
QPIRGDFNNT

SEQ ID NO: 148673 - protein, 10 aa, synthetic construct
QPKRGDFNNT

SEQ ID NO: 148674 - protein, 10 aa, synthetic construct
QPLRGDFNNT

SEQ ID NO: 148675 - protein, 10 aa, synthetic construct
QPMRGDFNNT

SEQ ID NO: 148676 - protein, 10 aa, synthetic construct
QPPRGDFNNT

SEQ ID NO: 148677 - protein, 10 aa, synthetic construct
QPRRGDFNNT

SEQ ID NO: 148678 - protein, 10 aa, synthetic construct
QPVRGDFNNT

SEQ ID NO: 148679 - protein, 10 aa, synthetic construct
QPWRGDFNNT

SEQ ID NO: 148680 - protein, 10 aa, synthetic construct
QPYRGDFNNT

SEQ ID NO: 148681 - protein, 10 aa, synthetic construct
QRARGDFNNT

SEQ ID NO: 148682 - protein, 10 aa, synthetic construct
QRDRGDFNNT

SEQ ID NO: 148683 - protein, 10 aa, synthetic construct
QRERGDFNNT

SEQ ID NO: 148684 - protein, 10 aa, synthetic construct
QRNRGDFNNT

SEQ ID NO: 148685 - protein, 10 aa, synthetic construct
QRQRGDFNNT

SEQ ID NO: 148686 - protein, 10 aa, synthetic construct
QRSRGDFNNT

SEQ ID NO: 148687 - protein, 10 aa, synthetic construct
QRTRGDFNNT

SEQ ID NO: 148688 - protein, 10 aa, synthetic construct
QRFRGDFNNT

SEQ ID NO: 148689 - protein, 10 aa, synthetic construct
QRGRGDFNNT

SEQ ID NO: 148690 - protein, 10 aa, synthetic construct
QRHRGDFNNT

SEQ ID NO: 148691 - protein, 10 aa, synthetic construct
QRIRGDFNNT

SEQ ID NO: 148692 - protein, 10 aa, synthetic construct
QRKRGDFNNT

SEQ ID NO: 148693 - protein, 10 aa, synthetic construct
QRLRGDFNNT

SEQ ID NO: 148694 - protein, 10 aa, synthetic construct
QRMRGDFNNT

SEQ ID NO: 148695 - protein, 10 aa, synthetic construct
QRPRGDFNNT

SEQ ID NO: 148696 - protein, 10 aa, synthetic construct
QRRRGDFNNT

SEQ ID NO: 148697 - protein, 10 aa, synthetic construct
QRVRGDFNNT

SEQ ID NO: 148698 - protein, 10 aa, synthetic construct
QRWRGDFNNT

SEQ ID NO: 148699 - protein, 10 aa, synthetic construct
QRYRGDFNNT

SEQ ID NO: 148700 - protein, 10 aa, synthetic construct
QVARGDFNNT

SEQ ID NO: 148701 - protein, 10 aa, synthetic construct
QVDRGDFNNT

SEQ ID NO: 148702 - protein, 10 aa, synthetic construct
QVERGDFNNT

SEQ ID NO: 148703 - protein, 10 aa, synthetic construct
QVNRGDFNNT

SEQ ID NO: 148704 - protein, 10 aa, synthetic construct
QVQRGDFNNT

SEQ ID NO: 148705 - protein, 10 aa, synthetic construct
QVSRGDFNNT

SEQ ID NO: 148706 - protein, 10 aa, synthetic construct
QVTRGDFNNT

SEQ ID NO: 148707 - protein, 10 aa, synthetic construct
QVFRGDFNNT

SEQ ID NO: 148708 - protein, 10 aa, synthetic construct
QVGRGDFNNT

SEQ ID NO: 148709 - protein, 10 aa, synthetic construct
QVHRGDFNNT

SEQ ID NO: 148710 - protein, 10 aa, synthetic construct
QVIRGDFNNT

SEQ ID NO: 148711 - protein, 10 aa, synthetic construct
QVKRGDFNNT

SEQ ID NO: 148712 - protein, 10 aa, synthetic construct
QVLRGDFNNT

SEQ ID NO: 148713 - protein, 10 aa, synthetic construct
QVMRGDFNNT

SEQ ID NO: 148714 - protein, 10 aa, synthetic construct
QVPRGDFNNT

SEQ ID NO: 148715 - protein, 10 aa, synthetic construct
QVRRGDFNNT

SEQ ID NO: 148716 - protein, 10 aa, synthetic construct
QVVRGDFNNT

SEQ ID NO: 148717 - protein, 10 aa, synthetic construct
QVWRGDFNNT

SEQ ID NO: 148718 - protein, 10 aa, synthetic construct
QVYRGDFNNT

SEQ ID NO: 148719 - protein, 10 aa, synthetic construct
QWARGDFNNT

SEQ ID NO: 148720 - protein, 10 aa, synthetic construct
QWDRGDFNNT

SEQ ID NO: 148721 - protein, 10 aa, synthetic construct
QWERGDFNNT

SEQ ID NO: 148722 - protein, 10 aa, synthetic construct
QWNRGDFNNT

SEQ ID NO: 148723 - protein, 10 aa, synthetic construct
QWQRGDFNNT

SEQ ID NO: 148724 - protein, 10 aa, synthetic construct
QWSRGDFNNT

SEQ ID NO: 148725 - protein, 10 aa, synthetic construct
QWTRGDFNNT

SEQ ID NO: 148726 - protein, 10 aa, synthetic construct
QWFRGDFNNT

SEQ ID NO: 148727 - protein, 10 aa, synthetic construct
QWGRGDFNNT

SEQ ID NO: 148728 - protein, 10 aa, synthetic construct
QWHRGDFNNT

SEQ ID NO: 148729 - protein, 10 aa, synthetic construct
QWIRGDFNNT

SEQ ID NO: 148730 - protein, 10 aa, synthetic construct
QWKRGDFNNT

SEQ ID NO: 148731 - protein, 10 aa, synthetic construct
QWLRGDFNNT

SEQ ID NO: 148732 - protein, 10 aa, synthetic construct
QWMRGDFNNT

SEQ ID NO: 148733 - protein, 10 aa, synthetic construct
QWPRGDFNNT

SEQ ID NO: 148734 - protein, 10 aa, synthetic construct
QWRRGDFNNT

SEQ ID NO: 148735 - protein, 10 aa, synthetic construct
QWVRGDFNNT

SEQ ID NO: 148736 - protein, 10 aa, synthetic construct
QWWRGDFNNT

SEQ ID NO: 148737 - protein, 10 aa, synthetic construct
QWYRGDFNNT

SEQ ID NO: 148738 - protein, 10 aa, synthetic construct
QYARGDFNNT

SEQ ID NO: 148739 - protein, 10 aa, synthetic construct
QYDRGDFNNT

SEQ ID NO: 148740 - protein, 10 aa, synthetic construct
QYERGDFNNT

SEQ ID NO: 148741 - protein, 10 aa, synthetic construct
QYNRGDFNNT

SEQ ID NO: 148742 - protein, 10 aa, synthetic construct
QYQRGDFNNT

SEQ ID NO: 148743 - protein, 10 aa, synthetic construct
QYSRGDFNNT

SEQ ID NO: 148744 - protein, 10 aa, synthetic construct
QYTRGDFNNT

SEQ ID NO: 148745 - protein, 10 aa, synthetic construct
QYFRGDFNNT

SEQ ID NO: 148746 - protein, 10 aa, synthetic construct
QYGRGDFNNT

SEQ ID NO: 148747 - protein, 10 aa, synthetic construct
QYHRGDFNNT

SEQ ID NO: 148748 - protein, 10 aa, synthetic construct
QYIRGDFNNT

SEQ ID NO: 148749 - protein, 10 aa, synthetic construct
QYKRGDFNNT

SEQ ID NO: 148750 - protein, 10 aa, synthetic construct
QYLRGDFNNT

SEQ ID NO: 148751 - protein, 10 aa, synthetic construct
QYMRGDFNNT

SEQ ID NO: 148752 - protein, 10 aa, synthetic construct
QYPRGDFNNT

SEQ ID NO: 148753 - protein, 10 aa, synthetic construct
QYRRGDFNNT

SEQ ID NO: 148754 - protein, 10 aa, synthetic construct
QYVRGDFNNT

SEQ ID NO: 148755 - protein, 10 aa, synthetic construct
QYWRGDFNNT

SEQ ID NO: 148756 - protein, 10 aa, synthetic construct
QYYRGDFNNT

SEQ ID NO: 148757 - protein, 10 aa, synthetic construct
SAARGDFNNT

SEQ ID NO: 148758 - protein, 10 aa, synthetic construct
SADRGDFNNT

SEQ ID NO: 148759 - protein, 10 aa, synthetic construct
SAERGDFNNT

SEQ ID NO: 148760 - protein, 10 aa, synthetic construct
SANRGDFNNT

SEQ ID NO: 148761 - protein, 10 aa, synthetic construct
SAQRGDFNNT

SEQ ID NO: 148762 - protein, 10 aa, synthetic construct
SASRGDFNNT

SEQ ID NO: 148763 - protein, 10 aa, synthetic construct
SATRGDFNNT

SEQ ID NO: 148764 - protein, 10 aa, synthetic construct
SAFRGDFNNT

SEQ ID NO: 148765 - protein, 10 aa, synthetic construct
SAGRGDFNNT

SEQ ID NO: 148766 - protein, 10 aa, synthetic construct
SAHRGDFNNT

SEQ ID NO: 148767 - protein, 10 aa, synthetic construct
SAIRGDFNNT

SEQ ID NO: 148768 - protein, 10 aa, synthetic construct
SAKRGDFNNT

SEQ ID NO: 148769 - protein, 10 aa, synthetic construct
SALRGDFNNT

SEQ ID NO: 148770 - protein, 10 aa, synthetic construct
SAMRGDFNNT

SEQ ID NO: 148771 - protein, 10 aa, synthetic construct
SAPRGDFNNT

SEQ ID NO: 148772 - protein, 10 aa, synthetic construct
SARRGDFNNT

SEQ ID NO: 148773 - protein, 10 aa, synthetic construct
SAVRGDFNNT

SEQ ID NO: 148774 - protein, 10 aa, synthetic construct
SAWRGDFNNT

SEQ ID NO: 148775 - protein, 10 aa, synthetic construct
SAYRGDFNNT

SEQ ID NO: 148776 - protein, 10 aa, synthetic construct
SDARGDFNNT

SEQ ID NO: 148777 - protein, 10 aa, synthetic construct
SDDRGDFNNT

SEQ ID NO: 148778 - protein, 10 aa, synthetic construct
SDERGDFNNT

SEQ ID NO: 148779 - protein, 10 aa, synthetic construct
SDNRGDFNNT

SEQ ID NO: 148780 - protein, 10 aa, synthetic construct
SDQRGDFNNT

SEQ ID NO: 148781 - protein, 10 aa, synthetic construct
SDSRGDFNNT

SEQ ID NO: 148782 - protein, 10 aa, synthetic construct
SDTRGDFNNT

SEQ ID NO: 148783 - protein, 10 aa, synthetic construct
SDFRGDFNNT

SEQ ID NO: 148784 - protein, 10 aa, synthetic construct
SDGRGDFNNT

SEQ ID NO: 148785 - protein, 10 aa, synthetic construct
SDHRGDFNNT

SEQ ID NO: 148786 - protein, 10 aa, synthetic construct
SDIRGDFNNT

SEQ ID NO: 148787 - protein, 10 aa, synthetic construct
SDKRGDFNNT

SEQ ID NO: 148788 - protein, 10 aa, synthetic construct
SDLRGDFNNT

SEQ ID NO: 148789 - protein, 10 aa, synthetic construct
SDMRGDFNNT

SEQ ID NO: 148790 - protein, 10 aa, synthetic construct
SDPRGDFNNT

SEQ ID NO: 148791 - protein, 10 aa, synthetic construct
SDRRGDFNNT

SEQ ID NO: 148792 - protein, 10 aa, synthetic construct
SDVRGDFNNT

SEQ ID NO: 148793 - protein, 10 aa, synthetic construct
SDWRGDFNNT

SEQ ID NO: 148794 - protein, 10 aa, synthetic construct
SDYRGDFNNT

SEQ ID NO: 148795 - protein, 10 aa, synthetic construct
SEARGDFNNT

SEQ ID NO: 148796 - protein, 10 aa, synthetic construct
SEDRGDFNNT

SEQ ID NO: 148797 - protein, 10 aa, synthetic construct
SEERGDFNNT

SEQ ID NO: 148798 - protein, 10 aa, synthetic construct
SENRGDFNNT

SEQ ID NO: 148799 - protein, 10 aa, synthetic construct
SEQRGDFNNT

SEQ ID NO: 148800 - protein, 10 aa, synthetic construct
SESRGDFNNT

SEQ ID NO: 148801 - protein, 10 aa, synthetic construct
SETRGDFNNT

SEQ ID NO: 148802 - protein, 10 aa, synthetic construct
SEFRGDFNNT

SEQ ID NO: 148803 - protein, 10 aa, synthetic construct
SEGRGDFNNT

SEQ ID NO: 148804 - protein, 10 aa, synthetic construct
SEHRGDFNNT

SEQ ID NO: 148805 - protein, 10 aa, synthetic construct
SEIRGDFNNT

SEQ ID NO: 148806 - protein, 10 aa, synthetic construct
SEKRGDFNNT

SEQ ID NO: 148807 - protein, 10 aa, synthetic construct
SELRGDFNNT

SEQ ID NO: 148808 - protein, 10 aa, synthetic construct
SEMRGDFNNT

SEQ ID NO: 148809 - protein, 10 aa, synthetic construct
SEPRGDFNNT

SEQ ID NO: 148810 - protein, 10 aa, synthetic construct
SERRGDFNNT

SEQ ID NO: 148811 - protein, 10 aa, synthetic construct
SEVRGDFNNT

SEQ ID NO: 148812 - protein, 10 aa, synthetic construct
SEWRGDFNNT

SEQ ID NO: 148813 - protein, 10 aa, synthetic construct
SEYRGDFNNT

SEQ ID NO: 148814 - protein, 10 aa, synthetic construct
SNARGDFNNT

SEQ ID NO: 148815 - protein, 10 aa, synthetic construct
SNDRGDFNNT

SEQ ID NO: 148816 - protein, 10 aa, synthetic construct
SNERGDFNNT

SEQ ID NO: 148817 - protein, 10 aa, synthetic construct
SNNRGDFNNT

SEQ ID NO: 148818 - protein, 10 aa, synthetic construct
SNQRGDFNNT

SEQ ID NO: 148819 - protein, 10 aa, synthetic construct
SNSRGDFNNT

SEQ ID NO: 148820 - protein, 10 aa, synthetic construct
SNTRGDFNNT

SEQ ID NO: 148821 - protein, 10 aa, synthetic construct
SNFRGDFNNT

SEQ ID NO: 148822 - protein, 10 aa, synthetic construct
SNGRGDFNNT

SEQ ID NO: 148823 - protein, 10 aa, synthetic construct
SNHRGDFNNT

SEQ ID NO: 148824 - protein, 10 aa, synthetic construct
SNIRGDFNNT

SEQ ID NO: 148825 - protein, 10 aa, synthetic construct
SNKRGDFNNT

SEQ ID NO: 148826 - protein, 10 aa, synthetic construct
SNLRGDFNNT

SEQ ID NO: 148827 - protein, 10 aa, synthetic construct
SNMRGDFNNT

SEQ ID NO: 148828 - protein, 10 aa, synthetic construct
SNPRGDFNNT

SEQ ID NO: 148829 - protein, 10 aa, synthetic construct
SNRRGDFNNT

SEQ ID NO: 148830 - protein, 10 aa, synthetic construct
SNVRGDFNNT

SEQ ID NO: 148831 - protein, 10 aa, synthetic construct
SNWRGDFNNT

SEQ ID NO: 148832 - protein, 10 aa, synthetic construct
SNYRGDFNNT

SEQ ID NO: 148833 - protein, 10 aa, synthetic construct
SQARGDFNNT

SEQ ID NO: 148834 - protein, 10 aa, synthetic construct
SQDRGDFNNT

SEQ ID NO: 148835 - protein, 10 aa, synthetic construct
SQERGDFNNT

SEQ ID NO: 148836 - protein, 10 aa, synthetic construct
SQNRGDFNNT

SEQ ID NO: 148837 - protein, 10 aa, synthetic construct
SQQRGDFNNT

SEQ ID NO: 148838 - protein, 10 aa, synthetic construct
SQSRGDFNNT

SEQ ID NO: 148839 - protein, 10 aa, synthetic construct
SQTRGDFNNT

SEQ ID NO: 148840 - protein, 10 aa, synthetic construct
SQFRGDFNNT

SEQ ID NO: 148841 - protein, 10 aa, synthetic construct
SQGRGDFNNT

SEQ ID NO: 148842 - protein, 10 aa, synthetic construct
SQHRGDFNNT

SEQ ID NO: 148843 - protein, 10 aa, synthetic construct
SQIRGDFNNT

SEQ ID NO: 148844 - protein, 10 aa, synthetic construct
SQKRGDFNNT

SEQ ID NO: 148845 - protein, 10 aa, synthetic construct
SQLRGDFNNT

SEQ ID NO: 148846 - protein, 10 aa, synthetic construct
SQMRGDFNNT

SEQ ID NO: 148847 - protein, 10 aa, synthetic construct
SQPRGDFNNT

SEQ ID NO: 148848 - protein, 10 aa, synthetic construct
SQRRGDFNNT

SEQ ID NO: 148849 - protein, 10 aa, synthetic construct
SQVRGDFNNT

SEQ ID NO: 148850 - protein, 10 aa, synthetic construct
SQWRGDFNNT

SEQ ID NO: 148851 - protein, 10 aa, synthetic construct
SQYRGDFNNT

SEQ ID NO: 148852 - protein, 10 aa, synthetic construct
SSARGDFNNT

SEQ ID NO: 148853 - protein, 10 aa, synthetic construct
SSDRGDFNNT

SEQ ID NO: 148854 - protein, 10 aa, synthetic construct
SSERGDFNNT

SEQ ID NO: 148855 - protein, 10 aa, synthetic construct
SSNRGDFNNT

SEQ ID NO: 148856 - protein, 10 aa, synthetic construct
SSQRGDFNNT

SEQ ID NO: 148857 - protein, 10 aa, synthetic construct
SSSRGDFNNT

SEQ ID NO: 148858 - protein, 10 aa, synthetic construct
SSTRGDFNNT

SEQ ID NO: 148859 - protein, 10 aa, synthetic construct
SSFRGDFNNT

SEQ ID NO: 148860 - protein, 10 aa, synthetic construct
SSGRGDFNNT

SEQ ID NO: 148861 - protein, 10 aa, synthetic construct
SSHRGDFNNT

SEQ ID NO: 148862 - protein, 10 aa, synthetic construct
SSIRGDFNNT

SEQ ID NO: 148863 - protein, 10 aa, synthetic construct
SSKRGDFNNT

SEQ ID NO: 148864 - protein, 10 aa, synthetic construct
SSLRGDFNNT

SEQ ID NO: 148865 - protein, 10 aa, synthetic construct
SSMRGDFNNT

SEQ ID NO: 148866 - protein, 10 aa, synthetic construct
SSPRGDFNNT

SEQ ID NO: 148867 - protein, 10 aa, synthetic construct
SSRRGDFNNT

SEQ ID NO: 148868 - protein, 10 aa, synthetic construct
SSVRGDFNNT

SEQ ID NO: 148869 - protein, 10 aa, synthetic construct
SSWRGDFNNT

SEQ ID NO: 148870 - protein, 10 aa, synthetic construct
SSYRGDFNNT

SEQ ID NO: 148871 - protein, 10 aa, synthetic construct
STARGDFNNT

SEQ ID NO: 148872 - protein, 10 aa, synthetic construct
STDRGDFNNT

SEQ ID NO: 148873 - protein, 10 aa, synthetic construct
STERGDFNNT

SEQ ID NO: 148874 - protein, 10 aa, synthetic construct
STNRGDFNNT

SEQ ID NO: 148875 - protein, 10 aa, synthetic construct
STQRGDFNNT

SEQ ID NO: 148876 - protein, 10 aa, synthetic construct
STSRGDFNNT

SEQ ID NO: 148877 - protein, 10 aa, synthetic construct
STTRGDFNNT

SEQ ID NO: 148878 - protein, 10 aa, synthetic construct
STFRGDFNNT

SEQ ID NO: 148879 - protein, 10 aa, synthetic construct
STGRGDFNNT

SEQ ID NO: 148880 - protein, 10 aa, synthetic construct
STHRGDFNNT

SEQ ID NO: 148881 - protein, 10 aa, synthetic construct
STIRGDFNNT

SEQ ID NO: 148882 - protein, 10 aa, synthetic construct
STKRGDFNNT

SEQ ID NO: 148883 - protein, 10 aa, synthetic construct
STLRGDFNNT

SEQ ID NO: 148884 - protein, 10 aa, synthetic construct
STMRGDFNNT

SEQ ID NO: 148885 - protein, 10 aa, synthetic construct
STPRGDFNNT

SEQ ID NO: 148886 - protein, 10 aa, synthetic construct
STRRGDFNNT

SEQ ID NO: 148887 - protein, 10 aa, synthetic construct
STVRGDFNNT

SEQ ID NO: 148888 - protein, 10 aa, synthetic construct
STWRGDFNNT

SEQ ID NO: 148889 - protein, 10 aa, synthetic construct
STYRGDFNNT

SEQ ID NO: 148890 - protein, 10 aa, synthetic construct
SFARGDFNNT

SEQ ID NO: 148891 - protein, 10 aa, synthetic construct
SFDRGDFNNT

SEQ ID NO: 148892 - protein, 10 aa, synthetic construct
SFERGDFNNT

SEQ ID NO: 148893 - protein, 10 aa, synthetic construct
SFNRGDFNNT

SEQ ID NO: 148894 - protein, 10 aa, synthetic construct
SFQRGDFNNT

SEQ ID NO: 148895 - protein, 10 aa, synthetic construct
SFSRGDFNNT

SEQ ID NO: 148896 - protein, 10 aa, synthetic construct
SFTRGDFNNT

SEQ ID NO: 148897 - protein, 10 aa, synthetic construct
SFFRGDFNNT

SEQ ID NO: 148898 - protein, 10 aa, synthetic construct
SFGRGDFNNT

SEQ ID NO: 148899 - protein, 10 aa, synthetic construct
SFHRGDFNNT

SEQ ID NO: 148900 - protein, 10 aa, synthetic construct
SFIRGDFNNT

SEQ ID NO: 148901 - protein, 10 aa, synthetic construct
SFKRGDFNNT

SEQ ID NO: 148902 - protein, 10 aa, synthetic construct
SFLRGDFNNT

SEQ ID NO: 148903 - protein, 10 aa, synthetic construct
SFMRGDFNNT

SEQ ID NO: 148904 - protein, 10 aa, synthetic construct
SFPRGDFNNT

SEQ ID NO: 148905 - protein, 10 aa, synthetic construct
SFRRGDFNNT

SEQ ID NO: 148906 - protein, 10 aa, synthetic construct
SFVRGDFNNT

SEQ ID NO: 148907 - protein, 10 aa, synthetic construct
SFWRGDFNNT

SEQ ID NO: 148908 - protein, 10 aa, synthetic construct
SFYRGDFNNT

SEQ ID NO: 148909 - protein, 10 aa, synthetic construct
SGARGDFNNT

SEQ ID NO: 148910 - protein, 10 aa, synthetic construct
SGDRGDFNNT

SEQ ID NO: 148911 - protein, 10 aa, synthetic construct
SGERGDFNNT

SEQ ID NO: 148912 - protein, 10 aa, synthetic construct
SGNRGDFNNT

SEQ ID NO: 148913 - protein, 10 aa, synthetic construct
SGQRGDFNNT

SEQ ID NO: 148914 - protein, 10 aa, synthetic construct
SGSRGDFNNT

SEQ ID NO: 148915 - protein, 10 aa, synthetic construct
SGTRGDFNNT

SEQ ID NO: 148916 - protein, 10 aa, synthetic construct
SGFRGDFNNT

SEQ ID NO: 148917 - protein, 10 aa, synthetic construct
SGGRGDFNNT

SEQ ID NO: 148918 - protein, 10 aa, synthetic construct
SGHRGDFNNT

SEQ ID NO: 148919 - protein, 10 aa, synthetic construct
SGIRGDFNNT

SEQ ID NO: 148920 - protein, 10 aa, synthetic construct
SGKRGDFNNT

SEQ ID NO: 148921 - protein, 10 aa, synthetic construct
SGLRGDFNNT

SEQ ID NO: 148922 - protein, 10 aa, synthetic construct
SGMRGDFNNT

SEQ ID NO: 148923 - protein, 10 aa, synthetic construct
SGPRGDFNNT

SEQ ID NO: 148924 - protein, 10 aa, synthetic construct
SGRRGDFNNT

SEQ ID NO: 148925 - protein, 10 aa, synthetic construct
SGVRGDFNNT

SEQ ID NO: 148926 - protein, 10 aa, synthetic construct
SGWRGDFNNT

SEQ ID NO: 148927 - protein, 10 aa, synthetic construct
SGYRGDFNNT

SEQ ID NO: 148928 - protein, 10 aa, synthetic construct
SHARGDFNNT

SEQ ID NO: 148929 - protein, 10 aa, synthetic construct
SHDRGDFNNT

SEQ ID NO: 148930 - protein, 10 aa, synthetic construct
SHERGDFNNT

SEQ ID NO: 148931 - protein, 10 aa, synthetic construct
SHNRGDFNNT

SEQ ID NO: 148932 - protein, 10 aa, synthetic construct
SHQRGDFNNT

SEQ ID NO: 148933 - protein, 10 aa, synthetic construct
SHSRGDFNNT

SEQ ID NO: 148934 - protein, 10 aa, synthetic construct
SHTRGDFNNT

SEQ ID NO: 148935 - protein, 10 aa, synthetic construct
SHFRGDFNNT

SEQ ID NO: 148936 - protein, 10 aa, synthetic construct
SHGRGDFNNT

SEQ ID NO: 148937 - protein, 10 aa, synthetic construct
SHHRGDFNNT

SEQ ID NO: 148938 - protein, 10 aa, synthetic construct
SHIRGDFNNT

SEQ ID NO: 148939 - protein, 10 aa, synthetic construct
SHKRGDFNNT

SEQ ID NO: 148940 - protein, 10 aa, synthetic construct
SHLRGDFNNT

SEQ ID NO: 148941 - protein, 10 aa, synthetic construct
SHMRGDFNNT

SEQ ID NO: 148942 - protein, 10 aa, synthetic construct
SHPRGDFNNT

SEQ ID NO: 148943 - protein, 10 aa, synthetic construct
SHRRGDFNNT

SEQ ID NO: 148944 - protein, 10 aa, synthetic construct
SHVRGDFNNT

SEQ ID NO: 148945 - protein, 10 aa, synthetic construct
SHWRGDFNNT

SEQ ID NO: 148946 - protein, 10 aa, synthetic construct
SHYRGDFNNT

SEQ ID NO: 148947 - protein, 10 aa, synthetic construct
SIARGDFNNT

SEQ ID NO: 148948 - protein, 10 aa, synthetic construct
SIDRGDFNNT

SEQ ID NO: 148949 - protein, 10 aa, synthetic construct
SIERGDFNNT

SEQ ID NO: 148950 - protein, 10 aa, synthetic construct
SINRGDFNNT

SEQ ID NO: 148951 - protein, 10 aa, synthetic construct
SIQRGDFNNT

SEQ ID NO: 148952 - protein, 10 aa, synthetic construct
SISRGDFNNT

SEQ ID NO: 148953 - protein, 10 aa, synthetic construct
SITRGDFNNT

SEQ ID NO: 148954 - protein, 10 aa, synthetic construct
SIFRGDFNNT

SEQ ID NO: 148955 - protein, 10 aa, synthetic construct
SIGRGDFNNT

SEQ ID NO: 148956 - protein, 10 aa, synthetic construct
SIHRGDFNNT

SEQ ID NO: 148957 - protein, 10 aa, synthetic construct
SIIRGDFNNT

SEQ ID NO: 148958 - protein, 10 aa, synthetic construct
SIKRGDFNNT

SEQ ID NO: 148959 - protein, 10 aa, synthetic construct
SILRGDFNNT

SEQ ID NO: 148960 - protein, 10 aa, synthetic construct
SIMRGDFNNT

SEQ ID NO: 148961 - protein, 10 aa, synthetic construct
SIPRGDFNNT

SEQ ID NO: 148962 - protein, 10 aa, synthetic construct
SIRRGDFNNT

SEQ ID NO: 148963 - protein, 10 aa, synthetic construct
SIVRGDFNNT

SEQ ID NO: 148964 - protein, 10 aa, synthetic construct
SIWRGDFNNT

SEQ ID NO: 148965 - protein, 10 aa, synthetic construct
SIYRGDFNNT

SEQ ID NO: 148966 - protein, 10 aa, synthetic construct
SKARGDFNNT

SEQ ID NO: 148967 - protein, 10 aa, synthetic construct
SKDRGDFNNT

SEQ ID NO: 148968 - protein, 10 aa, synthetic construct
SKERGDFNNT

SEQ ID NO: 148969 - protein, 10 aa, synthetic construct
SKNRGDFNNT

SEQ ID NO: 148970 - protein, 10 aa, synthetic construct
SKQRGDFNNT

SEQ ID NO: 148971 - protein, 10 aa, synthetic construct
SKSRGDFNNT

SEQ ID NO: 148972 - protein, 10 aa, synthetic construct
SKTRGDFNNT

SEQ ID NO: 148973 - protein, 10 aa, synthetic construct
SKFRGDFNNT

SEQ ID NO: 148974 - protein, 10 aa, synthetic construct
SKGRGDFNNT

SEQ ID NO: 148975 - protein, 10 aa, synthetic construct
SKHRGDFNNT

SEQ ID NO: 148976 - protein, 10 aa, synthetic construct
SKIRGDFNNT

SEQ ID NO: 148977 - protein, 10 aa, synthetic construct
SKKRGDFNNT

SEQ ID NO: 148978 - protein, 10 aa, synthetic construct
SKLRGDFNNT

SEQ ID NO: 148979 - protein, 10 aa, synthetic construct
SKMRGDFNNT

SEQ ID NO: 148980 - protein, 10 aa, synthetic construct
SKPRGDFNNT

SEQ ID NO: 148981 - protein, 10 aa, synthetic construct
SKRRGDFNNT

SEQ ID NO: 148982 - protein, 10 aa, synthetic construct
SKVRGDFNNT

SEQ ID NO: 148983 - protein, 10 aa, synthetic construct
SKWRGDFNNT

SEQ ID NO: 148984 - protein, 10 aa, synthetic construct
SKYRGDFNNT

SEQ ID NO: 148985 - protein, 10 aa, synthetic construct
SLARGDFNNT

SEQ ID NO: 148986 - protein, 10 aa, synthetic construct
SLDRGDFNNT

SEQ ID NO: 148987 - protein, 10 aa, synthetic construct
SLERGDFNNT

SEQ ID NO: 148988 - protein, 10 aa, synthetic construct
SLNRGDFNNT

SEQ ID NO: 148989 - protein, 10 aa, synthetic construct
SLQRGDFNNT

SEQ ID NO: 148990 - protein, 10 aa, synthetic construct
SLSRGDFNNT

SEQ ID NO: 148991 - protein, 10 aa, synthetic construct
SLTRGDFNNT

SEQ ID NO: 148992 - protein, 10 aa, synthetic construct
SLFRGDFNNT

SEQ ID NO: 148993 - protein, 10 aa, synthetic construct
SLGRGDFNNT

SEQ ID NO: 148994 - protein, 10 aa, synthetic construct
SLHRGDFNNT

SEQ ID NO: 148995 - protein, 10 aa, synthetic construct
SLIRGDFNNT

SEQ ID NO: 148996 - protein, 10 aa, synthetic construct
SLKRGDFNNT

SEQ ID NO: 148997 - protein, 10 aa, synthetic construct
SLLRGDFNNT

SEQ ID NO: 148998 - protein, 10 aa, synthetic construct
SLMRGDFNNT

SEQ ID NO: 148999 - protein, 10 aa, synthetic construct
SLPRGDFNNT

SEQ ID NO: 149000 - protein, 10 aa, synthetic construct
SLRRGDFNNT

SEQ ID NO: 149001 - protein, 10 aa, synthetic construct
SLVRGDFNNT

SEQ ID NO: 149002 - protein, 10 aa, synthetic construct
SLWRGDFNNT

SEQ ID NO: 149003 - protein, 10 aa, synthetic construct
SLYRGDFNNT

SEQ ID NO: 149004 - protein, 10 aa, synthetic construct
SMARGDFNNT

SEQ ID NO: 149005 - protein, 10 aa, synthetic construct
SMDRGDFNNT

SEQ ID NO: 149006 - protein, 10 aa, synthetic construct
SMERGDFNNT

SEQ ID NO: 149007 - protein, 10 aa, synthetic construct
SMNRGDFNNT

SEQ ID NO: 149008 - protein, 10 aa, synthetic construct
SMQRGDFNNT

SEQ ID NO: 149009 - protein, 10 aa, synthetic construct
SMSRGDFNNT

SEQ ID NO: 149010 - protein, 10 aa, synthetic construct
SMTRGDFNNT

SEQ ID NO: 149011 - protein, 10 aa, synthetic construct
SMFRGDFNNT

SEQ ID NO: 149012 - protein, 10 aa, synthetic construct
SMGRGDFNNT

SEQ ID NO: 149013 - protein, 10 aa, synthetic construct
SMHRGDFNNT

SEQ ID NO: 149014 - protein, 10 aa, synthetic construct
SMIRGDFNNT

SEQ ID NO: 149015 - protein, 10 aa, synthetic construct
SMKRGDFNNT

SEQ ID NO: 149016 - protein, 10 aa, synthetic construct
SMLRGDFNNT

SEQ ID NO: 149017 - protein, 10 aa, synthetic construct
SMMRGDFNNT

SEQ ID NO: 149018 - protein, 10 aa, synthetic construct
SMPRGDFNNT

SEQ ID NO: 149019 - protein, 10 aa, synthetic construct
SMRRGDFNNT

SEQ ID NO: 149020 - protein, 10 aa, synthetic construct
SMVRGDFNNT

SEQ ID NO: 149021 - protein, 10 aa, synthetic construct
SMWRGDFNNT

SEQ ID NO: 149022 - protein, 10 aa, synthetic construct
SMYRGDFNNT

SEQ ID NO: 149023 - protein, 10 aa, synthetic construct
SPARGDFNNT

SEQ ID NO: 149024 - protein, 10 aa, synthetic construct
SPDRGDFNNT

SEQ ID NO: 149025 - protein, 10 aa, synthetic construct
SPERGDFNNT

SEQ ID NO: 149026 - protein, 10 aa, synthetic construct
SPNRGDFNNT

SEQ ID NO: 149027 - protein, 10 aa, synthetic construct
SPQRGDFNNT

SEQ ID NO: 149028 - protein, 10 aa, synthetic construct
SPSRGDFNNT

SEQ ID NO: 149029 - protein, 10 aa, synthetic construct
SPTRGDFNNT

SEQ ID NO: 149030 - protein, 10 aa, synthetic construct
SPFRGDFNNT

SEQ ID NO: 149031 - protein, 10 aa, synthetic construct
SPGRGDFNNT

SEQ ID NO: 149032 - protein, 10 aa, synthetic construct
SPHRGDFNNT

SEQ ID NO: 149033 - protein, 10 aa, synthetic construct
SPIRGDFNNT

SEQ ID NO: 149034 - protein, 10 aa, synthetic construct
SPKRGDFNNT

SEQ ID NO: 149035 - protein, 10 aa, synthetic construct
SPLRGDFNNT

SEQ ID NO: 149036 - protein, 10 aa, synthetic construct
SPMRGDFNNT

SEQ ID NO: 149037 - protein, 10 aa, synthetic construct
SPPRGDFNNT

SEQ ID NO: 149038 - protein, 10 aa, synthetic construct
SPRRGDFNNT

SEQ ID NO: 149039 - protein, 10 aa, synthetic construct
SPVRGDFNNT

SEQ ID NO: 149040 - protein, 10 aa, synthetic construct
SPWRGDFNNT

SEQ ID NO: 149041 - protein, 10 aa, synthetic construct
SPYRGDFNNT

SEQ ID NO: 149042 - protein, 10 aa, synthetic construct
SRARGDFNNT

SEQ ID NO: 149043 - protein, 10 aa, synthetic construct
SRDRGDFNNT

SEQ ID NO: 149044 - protein, 10 aa, synthetic construct
SRERGDFNNT

SEQ ID NO: 149045 - protein, 10 aa, synthetic construct
SRNRGDFNNT

SEQ ID NO: 149046 - protein, 10 aa, synthetic construct
SRQRGDFNNT

SEQ ID NO: 149047 - protein, 10 aa, synthetic construct
SRSRGDFNNT

SEQ ID NO: 149048 - protein, 10 aa, synthetic construct
SRTRGDFNNT

SEQ ID NO: 149049 - protein, 10 aa, synthetic construct
SRFRGDFNNT

SEQ ID NO: 149050 - protein, 10 aa, synthetic construct
SRGRGDFNNT

SEQ ID NO: 149051 - protein, 10 aa, synthetic construct
SRHRGDFNNT

SEQ ID NO: 149052 - protein, 10 aa, synthetic construct
SRIRGDFNNT

SEQ ID NO: 149053 - protein, 10 aa, synthetic construct
SRKRGDFNNT

SEQ ID NO: 149054 - protein, 10 aa, synthetic construct
SRLRGDFNNT

SEQ ID NO: 149055 - protein, 10 aa, synthetic construct
SRMRGDFNNT

SEQ ID NO: 149056 - protein, 10 aa, synthetic construct
SRPRGDFNNT

SEQ ID NO: 149057 - protein, 10 aa, synthetic construct
SRRRGDFNNT

SEQ ID NO: 149058 - protein, 10 aa, synthetic construct
SRVRGDFNNT

SEQ ID NO: 149059 - protein, 10 aa, synthetic construct
SRWRGDFNNT

SEQ ID NO: 149060 - protein, 10 aa, synthetic construct
SRYRGDFNNT

SEQ ID NO: 149061 - protein, 10 aa, synthetic construct
SVARGDFNNT

SEQ ID NO: 149062 - protein, 10 aa, synthetic construct
SVDRGDFNNT

SEQ ID NO: 149063 - protein, 10 aa, synthetic construct
SVERGDFNNT

SEQ ID NO: 149064 - protein, 10 aa, synthetic construct
SVNRGDFNNT

SEQ ID NO: 149065 - protein, 10 aa, synthetic construct
SVQRGDFNNT

SEQ ID NO: 149066 - protein, 10 aa, synthetic construct
SVSRGDFNNT

SEQ ID NO: 149067 - protein, 10 aa, synthetic construct
SVTRGDFNNT

SEQ ID NO: 149068 - protein, 10 aa, synthetic construct
SVFRGDFNNT

SEQ ID NO: 149069 - protein, 10 aa, synthetic construct
SVGRGDFNNT

SEQ ID NO: 149070 - protein, 10 aa, synthetic construct
SVHRGDFNNT

SEQ ID NO: 149071 - protein, 10 aa, synthetic construct
SVIRGDFNNT

SEQ ID NO: 149072 - protein, 10 aa, synthetic construct
SVKRGDFNNT

SEQ ID NO: 149073 - protein, 10 aa, synthetic construct
SVLRGDFNNT

SEQ ID NO: 149074 - protein, 10 aa, synthetic construct
SVMRGDFNNT

SEQ ID NO: 149075 - protein, 10 aa, synthetic construct
SVPRGDFNNT

SEQ ID NO: 149076 - protein, 10 aa, synthetic construct
SVRRGDFNNT

SEQ ID NO: 149077 - protein, 10 aa, synthetic construct
SVVRGDFNNT

SEQ ID NO: 149078 - protein, 10 aa, synthetic construct
SVWRGDFNNT

SEQ ID NO: 149079 - protein, 10 aa, synthetic construct
SVYRGDFNNT

SEQ ID NO: 149080 - protein, 10 aa, synthetic construct
SWARGDFNNT

SEQ ID NO: 149081 - protein, 10 aa, synthetic construct
SWDRGDFNNT

SEQ ID NO: 149082 - protein, 10 aa, synthetic construct
SWERGDFNNT

SEQ ID NO: 149083 - protein, 10 aa, synthetic construct
SWNRGDFNNT

SEQ ID NO: 149084 - protein, 10 aa, synthetic construct
SWQRGDFNNT

SEQ ID NO: 149085 - protein, 10 aa, synthetic construct
SWSRGDFNNT

SEQ ID NO: 149086 - protein, 10 aa, synthetic construct
SWTRGDFNNT

SEQ ID NO: 149087 - protein, 10 aa, synthetic construct
SWFRGDFNNT

SEQ ID NO: 149088 - protein, 10 aa, synthetic construct
SWGRGDFNNT

SEQ ID NO: 149089 - protein, 10 aa, synthetic construct
SWHRGDFNNT

SEQ ID NO: 149090 - protein, 10 aa, synthetic construct
SWIRGDFNNT

SEQ ID NO: 149091 - protein, 10 aa, synthetic construct
SWKRGDFNNT

SEQ ID NO: 149092 - protein, 10 aa, synthetic construct
SWLRGDFNNT

SEQ ID NO: 149093 - protein, 10 aa, synthetic construct
SWMRGDFNNT

SEQ ID NO: 149094 - protein, 10 aa, synthetic construct
SWPRGDFNNT

SEQ ID NO: 149095 - protein, 10 aa, synthetic construct
SWRRGDFNNT

SEQ ID NO: 149096 - protein, 10 aa, synthetic construct
SWVRGDFNNT

SEQ ID NO: 149097 - protein, 10 aa, synthetic construct
SWWRGDFNNT

SEQ ID NO: 149098 - protein, 10 aa, synthetic construct
SWYRGDFNNT

SEQ ID NO: 149099 - protein, 10 aa, synthetic construct
SYARGDFNNT

SEQ ID NO: 149100 - protein, 10 aa, synthetic construct
SYDRGDFNNT

SEQ ID NO: 149101 - protein, 10 aa, synthetic construct
SYERGDFNNT

SEQ ID NO: 149102 - protein, 10 aa, synthetic construct
SYNRGDFNNT

SEQ ID NO: 149103 - protein, 10 aa, synthetic construct
SYQRGDFNNT

SEQ ID NO: 149104 - protein, 10 aa, synthetic construct
SYSRGDFNNT

SEQ ID NO: 149105 - protein, 10 aa, synthetic construct
SYTRGDFNNT

SEQ ID NO: 149106 - protein, 10 aa, synthetic construct
SYFRGDFNNT

SEQ ID NO: 149107 - protein, 10 aa, synthetic construct
SYGRGDFNNT

SEQ ID NO: 149108 - protein, 10 aa, synthetic construct
SYHRGDFNNT

SEQ ID NO: 149109 - protein, 10 aa, synthetic construct
SYIRGDFNNT

SEQ ID NO: 149110 - protein, 10 aa, synthetic construct
SYKRGDFNNT

SEQ ID NO: 149111 - protein, 10 aa, synthetic construct
SYLRGDFNNT

SEQ ID NO: 149112 - protein, 10 aa, synthetic construct
SYMRGDFNNT

SEQ ID NO: 149113 - protein, 10 aa, synthetic construct
SYPRGDFNNT

SEQ ID NO: 149114 - protein, 10 aa, synthetic construct
SYRRGDFNNT

SEQ ID NO: 149115 - protein, 10 aa, synthetic construct
SYVRGDFNNT

SEQ ID NO: 149116 - protein, 10 aa, synthetic construct
SYWRGDFNNT

SEQ ID NO: 149117 - protein, 10 aa, synthetic construct
SYYRGDFNNT

SEQ ID NO: 149118 - protein, 10 aa, synthetic construct
TAARGDFNNT

SEQ ID NO: 149119 - protein, 10 aa, synthetic construct
TADRGDFNNT

SEQ ID NO: 149120 - protein, 10 aa, synthetic construct
TAERGDFNNT

SEQ ID NO: 149121 - protein, 10 aa, synthetic construct
TANRGDFNNT

SEQ ID NO: 149122 - protein, 10 aa, synthetic construct
TAQRGDFNNT

SEQ ID NO: 149123 - protein, 10 aa, synthetic construct
TASRGDFNNT

SEQ ID NO: 149124 - protein, 10 aa, synthetic construct
TATRGDFNNT

SEQ ID NO: 149125 - protein, 10 aa, synthetic construct
TAFRGDFNNT

SEQ ID NO: 149126 - protein, 10 aa, synthetic construct
TAGRGDFNNT

SEQ ID NO: 149127 - protein, 10 aa, synthetic construct
TAHRGDFNNT

SEQ ID NO: 149128 - protein, 10 aa, synthetic construct
TAIRGDFNNT

SEQ ID NO: 149129 - protein, 10 aa, synthetic construct
TAKRGDFNNT

SEQ ID NO: 149130 - protein, 10 aa, synthetic construct
TALRGDFNNT

SEQ ID NO: 149131 - protein, 10 aa, synthetic construct
TAMRGDFNNT

SEQ ID NO: 149132 - protein, 10 aa, synthetic construct
TAPRGDFNNT

SEQ ID NO: 149133 - protein, 10 aa, synthetic construct
TARRGDFNNT

SEQ ID NO: 149134 - protein, 10 aa, synthetic construct
TAVRGDFNNT

SEQ ID NO: 149135 - protein, 10 aa, synthetic construct
TAWRGDFNNT

SEQ ID NO: 149136 - protein, 10 aa, synthetic construct
TAYRGDFNNT

SEQ ID NO: 149137 - protein, 10 aa, synthetic construct
TDARGDFNNT

SEQ ID NO: 149138 - protein, 10 aa, synthetic construct
TDDRGDFNNT

SEQ ID NO: 149139 - protein, 10 aa, synthetic construct
TDERGDFNNT

SEQ ID NO: 149140 - protein, 10 aa, synthetic construct
TDNRGDFNNT

SEQ ID NO: 149141 - protein, 10 aa, synthetic construct
TDQRGDFNNT

SEQ ID NO: 149142 - protein, 10 aa, synthetic construct
TDSRGDFNNT

SEQ ID NO: 149143 - protein, 10 aa, synthetic construct
TDTRGDFNNT

SEQ ID NO: 149144 - protein, 10 aa, synthetic construct
TDFRGDFNNT

SEQ ID NO: 149145 - protein, 10 aa, synthetic construct
TDGRGDFNNT

SEQ ID NO: 149146 - protein, 10 aa, synthetic construct
TDHRGDFNNT

SEQ ID NO: 149147 - protein, 10 aa, synthetic construct
TDIRGDFNNT

SEQ ID NO: 149148 - protein, 10 aa, synthetic construct
TDKRGDFNNT

SEQ ID NO: 149149 - protein, 10 aa, synthetic construct
TDLRGDFNNT

SEQ ID NO: 149150 - protein, 10 aa, synthetic construct
TDMRGDFNNT

SEQ ID NO: 149151 - protein, 10 aa, synthetic construct
TDPRGDFNNT

SEQ ID NO: 149152 - protein, 10 aa, synthetic construct
TDRRGDFNNT

SEQ ID NO: 149153 - protein, 10 aa, synthetic construct
TDVRGDFNNT

SEQ ID NO: 149154 - protein, 10 aa, synthetic construct
TDWRGDFNNT

SEQ ID NO: 149155 - protein, 10 aa, synthetic construct
TDYRGDFNNT

SEQ ID NO: 149156 - protein, 10 aa, synthetic construct
TEARGDFNNT

SEQ ID NO: 149157 - protein, 10 aa, synthetic construct
TEDRGDFNNT

SEQ ID NO: 149158 - protein, 10 aa, synthetic construct
TEERGDFNNT

SEQ ID NO: 149159 - protein, 10 aa, synthetic construct
TENRGDFNNT

SEQ ID NO: 149160 - protein, 10 aa, synthetic construct
TEQRGDFNNT

SEQ ID NO: 149161 - protein, 10 aa, synthetic construct
TESRGDFNNT

SEQ ID NO: 149162 - protein, 10 aa, synthetic construct
TETRGDFNNT

SEQ ID NO: 149163 - protein, 10 aa, synthetic construct
TEFRGDFNNT

SEQ ID NO: 149164 - protein, 10 aa, synthetic construct
TEGRGDFNNT

SEQ ID NO: 149165 - protein, 10 aa, synthetic construct
TEHRGDFNNT

SEQ ID NO: 149166 - protein, 10 aa, synthetic construct
TEIRGDFNNT

SEQ ID NO: 149167 - protein, 10 aa, synthetic construct
TEKRGDFNNT

SEQ ID NO: 149168 - protein, 10 aa, synthetic construct
TELRGDFNNT

SEQ ID NO: 149169 - protein, 10 aa, synthetic construct
TEMRGDFNNT

SEQ ID NO: 149170 - protein, 10 aa, synthetic construct
TEPRGDFNNT

SEQ ID NO: 149171 - protein, 10 aa, synthetic construct
TERRGDFNNT

SEQ ID NO: 149172 - protein, 10 aa, synthetic construct
TEVRGDFNNT

SEQ ID NO: 149173 - protein, 10 aa, synthetic construct
TEWRGDFNNT

SEQ ID NO: 149174 - protein, 10 aa, synthetic construct
TEYRGDFNNT

SEQ ID NO: 149175 - protein, 10 aa, synthetic construct
TNARGDFNNT

SEQ ID NO: 149176 - protein, 10 aa, synthetic construct
TNDRGDFNNT

SEQ ID NO: 149177 - protein, 10 aa, synthetic construct
TNERGDFNNT

SEQ ID NO: 149178 - protein, 10 aa, synthetic construct
TNNRGDFNNT

SEQ ID NO: 149179 - protein, 10 aa, synthetic construct
TNQRGDFNNT

SEQ ID NO: 149180 - protein, 10 aa, synthetic construct
TNSRGDFNNT

SEQ ID NO: 149181 - protein, 10 aa, synthetic construct
TNTRGDFNNT

SEQ ID NO: 149182 - protein, 10 aa, synthetic construct
TNFRGDFNNT

SEQ ID NO: 149183 - protein, 10 aa, synthetic construct
TNGRGDFNNT

SEQ ID NO: 149184 - protein, 10 aa, synthetic construct
TNHRGDFNNT

SEQ ID NO: 149185 - protein, 10 aa, synthetic construct
TNIRGDFNNT

SEQ ID NO: 149186 - protein, 10 aa, synthetic construct
TNKRGDFNNT

SEQ ID NO: 149187 - protein, 10 aa, synthetic construct
TNLRGDFNNT

SEQ ID NO: 149188 - protein, 10 aa, synthetic construct
TNMRGDFNNT

SEQ ID NO: 149189 - protein, 10 aa, synthetic construct
TNPRGDFNNT

SEQ ID NO: 149190 - protein, 10 aa, synthetic construct
TNRRGDFNNT

SEQ ID NO: 149191 - protein, 10 aa, synthetic construct
TNVRGDFNNT

SEQ ID NO: 149192 - protein, 10 aa, synthetic construct
TNWRGDFNNT

SEQ ID NO: 149193 - protein, 10 aa, synthetic construct
TNYRGDFNNT

SEQ ID NO: 149194 - protein, 10 aa, synthetic construct
TQARGDFNNT

SEQ ID NO: 149195 - protein, 10 aa, synthetic construct
TQDRGDFNNT

SEQ ID NO: 149196 - protein, 10 aa, synthetic construct
TQERGDFNNT

SEQ ID NO: 149197 - protein, 10 aa, synthetic construct
TQNRGDFNNT

SEQ ID NO: 149198 - protein, 10 aa, synthetic construct
TQQRGDFNNT

SEQ ID NO: 149199 - protein, 10 aa, synthetic construct
TQSRGDFNNT

SEQ ID NO: 149200 - protein, 10 aa, synthetic construct
TQTRGDFNNT

SEQ ID NO: 149201 - protein, 10 aa, synthetic construct
TQFRGDFNNT

SEQ ID NO: 149202 - protein, 10 aa, synthetic construct
TQGRGDFNNT

SEQ ID NO: 149203 - protein, 10 aa, synthetic construct
TQHRGDFNNT

SEQ ID NO: 149204 - protein, 10 aa, synthetic construct
TQIRGDFNNT

SEQ ID NO: 149205 - protein, 10 aa, synthetic construct
TQKRGDFNNT

SEQ ID NO: 149206 - protein, 10 aa, synthetic construct
TQLRGDFNNT

SEQ ID NO: 149207 - protein, 10 aa, synthetic construct
TQMRGDFNNT

SEQ ID NO: 149208 - protein, 10 aa, synthetic construct
TQPRGDFNNT

SEQ ID NO: 149209 - protein, 10 aa, synthetic construct
TQRRGDFNNT

SEQ ID NO: 149210 - protein, 10 aa, synthetic construct
TQVRGDFNNT

SEQ ID NO: 149211 - protein, 10 aa, synthetic construct
TQWRGDFNNT

SEQ ID NO: 149212 - protein, 10 aa, synthetic construct
TQYRGDFNNT

SEQ ID NO: 149213 - protein, 10 aa, synthetic construct
TSARGDFNNT

SEQ ID NO: 149214 - protein, 10 aa, synthetic construct
TSDRGDFNNT

SEQ ID NO: 149215 - protein, 10 aa, synthetic construct
TSERGDFNNT

SEQ ID NO: 149216 - protein, 10 aa, synthetic construct
TSNRGDFNNT

SEQ ID NO: 149217 - protein, 10 aa, synthetic construct
TSQRGDFNNT

SEQ ID NO: 149218 - protein, 10 aa, synthetic construct
TSSRGDFNNT

SEQ ID NO: 149219 - protein, 10 aa, synthetic construct
TSTRGDFNNT

SEQ ID NO: 149220 - protein, 10 aa, synthetic construct
TSFRGDFNNT

SEQ ID NO: 149221 - protein, 10 aa, synthetic construct
TSGRGDFNNT

SEQ ID NO: 149222 - protein, 10 aa, synthetic construct
TSHRGDFNNT

SEQ ID NO: 149223 - protein, 10 aa, synthetic construct
TSIRGDFNNT

SEQ ID NO: 149224 - protein, 10 aa, synthetic construct
TSKRGDFNNT

SEQ ID NO: 149225 - protein, 10 aa, synthetic construct
TSLRGDFNNT

SEQ ID NO: 149226 - protein, 10 aa, synthetic construct
TSMRGDFNNT

SEQ ID NO: 149227 - protein, 10 aa, synthetic construct
TSPRGDFNNT

SEQ ID NO: 149228 - protein, 10 aa, synthetic construct
TSRRGDFNNT

SEQ ID NO: 149229 - protein, 10 aa, synthetic construct
TSVRGDFNNT

SEQ ID NO: 149230 - protein, 10 aa, synthetic construct
TSWRGDFNNT

SEQ ID NO: 149231 - protein, 10 aa, synthetic construct
TSYRGDFNNT

SEQ ID NO: 149232 - protein, 10 aa, synthetic construct
TTARGDFNNT

SEQ ID NO: 149233 - protein, 10 aa, synthetic construct
TTDRGDFNNT

SEQ ID NO: 149234 - protein, 10 aa, synthetic construct
TTERGDFNNT

SEQ ID NO: 149235 - protein, 10 aa, synthetic construct
TTNRGDFNNT

SEQ ID NO: 149236 - protein, 10 aa, synthetic construct
TTQRGDFNNT

SEQ ID NO: 149237 - protein, 10 aa, synthetic construct
TTSRGDFNNT

SEQ ID NO: 149238 - protein, 10 aa, synthetic construct
TTTRGDFNNT

SEQ ID NO: 149239 - protein, 10 aa, synthetic construct
TTFRGDFNNT

SEQ ID NO: 149240 - protein, 10 aa, synthetic construct
TTGRGDFNNT

SEQ ID NO: 149241 - protein, 10 aa, synthetic construct
TTHRGDFNNT

SEQ ID NO: 149242 - protein, 10 aa, synthetic construct
TTIRGDFNNT

SEQ ID NO: 149243 - protein, 10 aa, synthetic construct
TTKRGDFNNT

SEQ ID NO: 149244 - protein, 10 aa, synthetic construct
TTLRGDFNNT

SEQ ID NO: 149245 - protein, 10 aa, synthetic construct
TTMRGDFNNT

SEQ ID NO: 149246 - protein, 10 aa, synthetic construct
TTPRGDFNNT

SEQ ID NO: 149247 - protein, 10 aa, synthetic construct
TTRRGDFNNT

SEQ ID NO: 149248 - protein, 10 aa, synthetic construct
TTVRGDFNNT

SEQ ID NO: 149249 - protein, 10 aa, synthetic construct
TTWRGDFNNT

SEQ ID NO: 149250 - protein, 10 aa, synthetic construct
TTYRGDFNNT

SEQ ID NO: 149251 - protein, 10 aa, synthetic construct
TFARGDFNNT

SEQ ID NO: 149252 - protein, 10 aa, synthetic construct
TFDRGDFNNT

SEQ ID NO: 149253 - protein, 10 aa, synthetic construct
TFERGDFNNT

SEQ ID NO: 149254 - protein, 10 aa, synthetic construct
TFNRGDFNNT

SEQ ID NO: 149255 - protein, 10 aa, synthetic construct
TFQRGDFNNT

SEQ ID NO: 149256 - protein, 10 aa, synthetic construct
TFSRGDFNNT

SEQ ID NO: 149257 - protein, 10 aa, synthetic construct
TFTRGDFNNT

SEQ ID NO: 149258 - protein, 10 aa, synthetic construct
TFFRGDFNNT

SEQ ID NO: 149259 - protein, 10 aa, synthetic construct
TFGRGDFNNT

SEQ ID NO: 149260 - protein, 10 aa, synthetic construct
TFHRGDFNNT

SEQ ID NO: 149261 - protein, 10 aa, synthetic construct
TFIRGDFNNT

SEQ ID NO: 149262 - protein, 10 aa, synthetic construct
TFKRGDFNNT

SEQ ID NO: 149263 - protein, 10 aa, synthetic construct
TFLRGDFNNT

SEQ ID NO: 149264 - protein, 10 aa, synthetic construct
TFMRGDFNNT

SEQ ID NO: 149265 - protein, 10 aa, synthetic construct
TFPRGDFNNT

SEQ ID NO: 149266 - protein, 10 aa, synthetic construct
TFRRGDFNNT

SEQ ID NO: 149267 - protein, 10 aa, synthetic construct
TFVRGDFNNT

SEQ ID NO: 149268 - protein, 10 aa, synthetic construct
TFWRGDFNNT

SEQ ID NO: 149269 - protein, 10 aa, synthetic construct
TFYRGDFNNT

SEQ ID NO: 149270 - protein, 10 aa, synthetic construct
TGARGDFNNT

SEQ ID NO: 149271 - protein, 10 aa, synthetic construct
TGDRGDFNNT

SEQ ID NO: 149272 - protein, 10 aa, synthetic construct
TGERGDFNNT

SEQ ID NO: 149273 - protein, 10 aa, synthetic construct
TGNRGDFNNT

SEQ ID NO: 149274 - protein, 10 aa, synthetic construct
TGQRGDFNNT

SEQ ID NO: 149275 - protein, 10 aa, synthetic construct
TGSRGDFNNT

SEQ ID NO: 149276 - protein, 10 aa, synthetic construct
TGTRGDFNNT

SEQ ID NO: 149277 - protein, 10 aa, synthetic construct
TGFRGDFNNT

SEQ ID NO: 149278 - protein, 10 aa, synthetic construct
TGGRGDFNNT

SEQ ID NO: 149279 - protein, 10 aa, synthetic construct
TGHRGDFNNT

SEQ ID NO: 149280 - protein, 10 aa, synthetic construct
TGIRGDFNNT

SEQ ID NO: 149281 - protein, 10 aa, synthetic construct
TGKRGDFNNT

SEQ ID NO: 149282 - protein, 10 aa, synthetic construct
TGLRGDFNNT

SEQ ID NO: 149283 - protein, 10 aa, synthetic construct
TGMRGDFNNT

SEQ ID NO: 149284 - protein, 10 aa, synthetic construct
TGPRGDFNNT

SEQ ID NO: 149285 - protein, 10 aa, synthetic construct
TGRRGDFNNT

SEQ ID NO: 149286 - protein, 10 aa, synthetic construct
TGVRGDFNNT

SEQ ID NO: 149287 - protein, 10 aa, synthetic construct
TGWRGDFNNT

SEQ ID NO: 149288 - protein, 10 aa, synthetic construct
TGYRGDFNNT

SEQ ID NO: 149289 - protein, 10 aa, synthetic construct
THARGDFNNT

SEQ ID NO: 149290 - protein, 10 aa, synthetic construct
THDRGDFNNT

SEQ ID NO: 149291 - protein, 10 aa, synthetic construct
THERGDFNNT

SEQ ID NO: 149292 - protein, 10 aa, synthetic construct
THNRGDFNNT

SEQ ID NO: 149293 - protein, 10 aa, synthetic construct
THQRGDFNNT

SEQ ID NO: 149294 - protein, 10 aa, synthetic construct
THSRGDFNNT

SEQ ID NO: 149295 - protein, 10 aa, synthetic construct
THTRGDFNNT

SEQ ID NO: 149296 - protein, 10 aa, synthetic construct
THFRGDFNNT

SEQ ID NO: 149297 - protein, 10 aa, synthetic construct
THGRGDFNNT

SEQ ID NO: 149298 - protein, 10 aa, synthetic construct
THHRGDFNNT

SEQ ID NO: 149299 - protein, 10 aa, synthetic construct
THIRGDFNNT

SEQ ID NO: 149300 - protein, 10 aa, synthetic construct
THKRGDFNNT

SEQ ID NO: 149301 - protein, 10 aa, synthetic construct
THLRGDFNNT

SEQ ID NO: 149302 - protein, 10 aa, synthetic construct
THMRGDFNNT

SEQ ID NO: 149303 - protein, 10 aa, synthetic construct
THPRGDFNNT

SEQ ID NO: 149304 - protein, 10 aa, synthetic construct
THRRGDFNNT

SEQ ID NO: 149305 - protein, 10 aa, synthetic construct
THVRGDFNNT

SEQ ID NO: 149306 - protein, 10 aa, synthetic construct
THWRGDFNNT

SEQ ID NO: 149307 - protein, 10 aa, synthetic construct
THYRGDFNNT

SEQ ID NO: 149308 - protein, 10 aa, synthetic construct
TIARGDFNNT

SEQ ID NO: 149309 - protein, 10 aa, synthetic construct
TIDRGDFNNT

SEQ ID NO: 149310 - protein, 10 aa, synthetic construct
TIERGDFNNT

SEQ ID NO: 149311 - protein, 10 aa, synthetic construct
TINRGDFNNT

SEQ ID NO: 149312 - protein, 10 aa, synthetic construct
TIQRGDFNNT

SEQ ID NO: 149313 - protein, 10 aa, synthetic construct
TISRGDFNNT

SEQ ID NO: 149314 - protein, 10 aa, synthetic construct
TITRGDFNNT

SEQ ID NO: 149315 - protein, 10 aa, synthetic construct
TIFRGDFNNT

SEQ ID NO: 149316 - protein, 10 aa, synthetic construct
TIGRGDFNNT

SEQ ID NO: 149317 - protein, 10 aa, synthetic construct
TIHRGDFNNT

SEQ ID NO: 149318 - protein, 10 aa, synthetic construct
TIIRGDFNNT

SEQ ID NO: 149319 - protein, 10 aa, synthetic construct
TIKRGDFNNT

SEQ ID NO: 149320 - protein, 10 aa, synthetic construct
TILRGDFNNT

SEQ ID NO: 149321 - protein, 10 aa, synthetic construct
TIMRGDFNNT

SEQ ID NO: 149322 - protein, 10 aa, synthetic construct
TIPRGDFNNT

SEQ ID NO: 149323 - protein, 10 aa, synthetic construct
TIRRGDFNNT

SEQ ID NO: 149324 - protein, 10 aa, synthetic construct
TIVRGDFNNT

SEQ ID NO: 149325 - protein, 10 aa, synthetic construct
TIWRGDFNNT

SEQ ID NO: 149326 - protein, 10 aa, synthetic construct
TIYRGDFNNT

SEQ ID NO: 149327 - protein, 10 aa, synthetic construct
TKARGDFNNT

SEQ ID NO: 149328 - protein, 10 aa, synthetic construct
TKDRGDFNNT

SEQ ID NO: 149329 - protein, 10 aa, synthetic construct
TKERGDFNNT

SEQ ID NO: 149330 - protein, 10 aa, synthetic construct
TKNRGDFNNT

SEQ ID NO: 149331 - protein, 10 aa, synthetic construct
TKQRGDFNNT

SEQ ID NO: 149332 - protein, 10 aa, synthetic construct
TKSRGDFNNT

SEQ ID NO: 149333 - protein, 10 aa, synthetic construct
TKTRGDFNNT

SEQ ID NO: 149334 - protein, 10 aa, synthetic construct
TKFRGDFNNT

SEQ ID NO: 149335 - protein, 10 aa, synthetic construct
TKGRGDFNNT

SEQ ID NO: 149336 - protein, 10 aa, synthetic construct
TKHRGDFNNT

SEQ ID NO: 149337 - protein, 10 aa, synthetic construct
TKIRGDFNNT

SEQ ID NO: 149338 - protein, 10 aa, synthetic construct
TKKRGDFNNT

SEQ ID NO: 149339 - protein, 10 aa, synthetic construct
TKLRGDFNNT

SEQ ID NO: 149340 - protein, 10 aa, synthetic construct
TKMRGDFNNT

SEQ ID NO: 149341 - protein, 10 aa, synthetic construct
TKPRGDFNNT

SEQ ID NO: 149342 - protein, 10 aa, synthetic construct
TKRRGDFNNT

SEQ ID NO: 149343 - protein, 10 aa, synthetic construct
TKVRGDFNNT

SEQ ID NO: 149344 - protein, 10 aa, synthetic construct
TKWRGDFNNT

SEQ ID NO: 149345 - protein, 10 aa, synthetic construct
TKYRGDFNNT

SEQ ID NO: 149346 - protein, 10 aa, synthetic construct
TLARGDFNNT

SEQ ID NO: 149347 - protein, 10 aa, synthetic construct
TLDRGDFNNT

SEQ ID NO: 149348 - protein, 10 aa, synthetic construct
TLERGDFNNT

SEQ ID NO: 149349 - protein, 10 aa, synthetic construct
TLNRGDFNNT

SEQ ID NO: 149350 - protein, 10 aa, synthetic construct
TLQRGDFNNT

SEQ ID NO: 149351 - protein, 10 aa, synthetic construct
TLSRGDFNNT

SEQ ID NO: 149352 - protein, 10 aa, synthetic construct
TLTRGDFNNT

SEQ ID NO: 149353 - protein, 10 aa, synthetic construct
TLFRGDFNNT

SEQ ID NO: 149354 - protein, 10 aa, synthetic construct
TLGRGDFNNT

SEQ ID NO: 149355 - protein, 10 aa, synthetic construct
TLHRGDFNNT

SEQ ID NO: 149356 - protein, 10 aa, synthetic construct
TLIRGDFNNT

SEQ ID NO: 149357 - protein, 10 aa, synthetic construct
TLKRGDFNNT

SEQ ID NO: 149358 - protein, 10 aa, synthetic construct
TLLRGDFNNT

SEQ ID NO: 149359 - protein, 10 aa, synthetic construct
TLMRGDFNNT

SEQ ID NO: 149360 - protein, 10 aa, synthetic construct
TLPRGDFNNT

SEQ ID NO: 149361 - protein, 10 aa, synthetic construct
TLRRGDFNNT

SEQ ID NO: 149362 - protein, 10 aa, synthetic construct
TLVRGDFNNT

SEQ ID NO: 149363 - protein, 10 aa, synthetic construct
TLWRGDFNNT

SEQ ID NO: 149364 - protein, 10 aa, synthetic construct
TLYRGDFNNT

SEQ ID NO: 149365 - protein, 10 aa, synthetic construct
TMARGDFNNT

SEQ ID NO: 149366 - protein, 10 aa, synthetic construct
TMDRGDFNNT

SEQ ID NO: 149367 - protein, 10 aa, synthetic construct
TMERGDFNNT

SEQ ID NO: 149368 - protein, 10 aa, synthetic construct
TMNRGDFNNT

SEQ ID NO: 149369 - protein, 10 aa, synthetic construct
TMQRGDFNNT

SEQ ID NO: 149370 - protein, 10 aa, synthetic construct
TMSRGDFNNT

SEQ ID NO: 149371 - protein, 10 aa, synthetic construct
TMTRGDFNNT

SEQ ID NO: 149372 - protein, 10 aa, synthetic construct
TMFRGDFNNT

SEQ ID NO: 149373 - protein, 10 aa, synthetic construct
TMGRGDFNNT

SEQ ID NO: 149374 - protein, 10 aa, synthetic construct
TMHRGDFNNT

SEQ ID NO: 149375 - protein, 10 aa, synthetic construct
TMIRGDFNNT

SEQ ID NO: 149376 - protein, 10 aa, synthetic construct
TMKRGDFNNT

SEQ ID NO: 149377 - protein, 10 aa, synthetic construct
TMLRGDFNNT

SEQ ID NO: 149378 - protein, 10 aa, synthetic construct
TMMRGDFNNT

SEQ ID NO: 149379 - protein, 10 aa, synthetic construct
TMPRGDFNNT

SEQ ID NO: 149380 - protein, 10 aa, synthetic construct
TMRRGDFNNT

SEQ ID NO: 149381 - protein, 10 aa, synthetic construct
TMVRGDFNNT

SEQ ID NO: 149382 - protein, 10 aa, synthetic construct
TMWRGDFNNT

SEQ ID NO: 149383 - protein, 10 aa, synthetic construct
TMYRGDFNNT

SEQ ID NO: 149384 - protein, 10 aa, synthetic construct
TPARGDFNNT

SEQ ID NO: 149385 - protein, 10 aa, synthetic construct
TPDRGDFNNT

SEQ ID NO: 149386 - protein, 10 aa, synthetic construct
TPERGDFNNT

SEQ ID NO: 149387 - protein, 10 aa, synthetic construct
TPNRGDFNNT

SEQ ID NO: 149388 - protein, 10 aa, synthetic construct
TPQRGDFNNT

SEQ ID NO: 149389 - protein, 10 aa, synthetic construct
TPSRGDFNNT

SEQ ID NO: 149390 - protein, 10 aa, synthetic construct
TPTRGDFNNT

SEQ ID NO: 149391 - protein, 10 aa, synthetic construct
TPFRGDFNNT

SEQ ID NO: 149392 - protein, 10 aa, synthetic construct
TPGRGDFNNT

SEQ ID NO: 149393 - protein, 10 aa, synthetic construct
TPHRGDFNNT

SEQ ID NO: 149394 - protein, 10 aa, synthetic construct
TPIRGDFNNT

SEQ ID NO: 149395 - protein, 10 aa, synthetic construct
TPKRGDFNNT

SEQ ID NO: 149396 - protein, 10 aa, synthetic construct
TPLRGDFNNT

SEQ ID NO: 149397 - protein, 10 aa, synthetic construct
TPMRGDFNNT

SEQ ID NO: 149398 - protein, 10 aa, synthetic construct
TPPRGDFNNT

SEQ ID NO: 149399 - protein, 10 aa, synthetic construct
TPRRGDFNNT

SEQ ID NO: 149400 - protein, 10 aa, synthetic construct
TPVRGDFNNT

SEQ ID NO: 149401 - protein, 10 aa, synthetic construct
TPWRGDFNNT

SEQ ID NO: 149402 - protein, 10 aa, synthetic construct
TPYRGDFNNT

SEQ ID NO: 149403 - protein, 10 aa, synthetic construct
TRARGDFNNT

SEQ ID NO: 149404 - protein, 10 aa, synthetic construct
TRDRGDFNNT

SEQ ID NO: 149405 - protein, 10 aa, synthetic construct
TRERGDFNNT

SEQ ID NO: 149406 - protein, 10 aa, synthetic construct
TRNRGDFNNT

SEQ ID NO: 149407 - protein, 10 aa, synthetic construct
TRQRGDFNNT

SEQ ID NO: 149408 - protein, 10 aa, synthetic construct
TRSRGDFNNT

SEQ ID NO: 149409 - protein, 10 aa, synthetic construct
TRTRGDFNNT

SEQ ID NO: 149410 - protein, 10 aa, synthetic construct
TRFRGDFNNT

SEQ ID NO: 149411 - protein, 10 aa, synthetic construct
TRGRGDFNNT

SEQ ID NO: 149412 - protein, 10 aa, synthetic construct
TRHRGDFNNT

SEQ ID NO: 149413 - protein, 10 aa, synthetic construct
TRIRGDFNNT

SEQ ID NO: 149414 - protein, 10 aa, synthetic construct
TRKRGDFNNT

SEQ ID NO: 149415 - protein, 10 aa, synthetic construct
TRLRGDFNNT

SEQ ID NO: 149416 - protein, 10 aa, synthetic construct
TRMRGDFNNT

SEQ ID NO: 149417 - protein, 10 aa, synthetic construct
TRPRGDFNNT

SEQ ID NO: 149418 - protein, 10 aa, synthetic construct
TRRRGDFNNT

SEQ ID NO: 149419 - protein, 10 aa, synthetic construct
TRVRGDFNNT

SEQ ID NO: 149420 - protein, 10 aa, synthetic construct
TRWRGDFNNT

SEQ ID NO: 149421 - protein, 10 aa, synthetic construct
TRYRGDFNNT

SEQ ID NO: 149422 - protein, 10 aa, synthetic construct
TVARGDFNNT

SEQ ID NO: 149423 - protein, 10 aa, synthetic construct
TVDRGDFNNT

SEQ ID NO: 149424 - protein, 10 aa, synthetic construct
TVERGDFNNT

SEQ ID NO: 149425 - protein, 10 aa, synthetic construct
TVNRGDFNNT

SEQ ID NO: 149426 - protein, 10 aa, synthetic construct
TVQRGDFNNT

SEQ ID NO: 149427 - protein, 10 aa, synthetic construct
TVSRGDFNNT

SEQ ID NO: 149428 - protein, 10 aa, synthetic construct
TVTRGDFNNT

SEQ ID NO: 149429 - protein, 10 aa, synthetic construct
TVFRGDFNNT

SEQ ID NO: 149430 - protein, 10 aa, synthetic construct
TVGRGDFNNT

SEQ ID NO: 149431 - protein, 10 aa, synthetic construct
TVHRGDFNNT

SEQ ID NO: 149432 - protein, 10 aa, synthetic construct
TVIRGDFNNT

SEQ ID NO: 149433 - protein, 10 aa, synthetic construct
TVKRGDFNNT

SEQ ID NO: 149434 - protein, 10 aa, synthetic construct
TVLRGDFNNT

SEQ ID NO: 149435 - protein, 10 aa, synthetic construct
TVMRGDFNNT

SEQ ID NO: 149436 - protein, 10 aa, synthetic construct
TVPRGDFNNT

SEQ ID NO: 149437 - protein, 10 aa, synthetic construct
TVRRGDFNNT

SEQ ID NO: 149438 - protein, 10 aa, synthetic construct
TVVRGDFNNT

SEQ ID NO: 149439 - protein, 10 aa, synthetic construct
TVWRGDFNNT

SEQ ID NO: 149440 - protein, 10 aa, synthetic construct
TVYRGDFNNT

SEQ ID NO: 149441 - protein, 10 aa, synthetic construct
TWARGDFNNT

SEQ ID NO: 149442 - protein, 10 aa, synthetic construct
TWDRGDFNNT

SEQ ID NO: 149443 - protein, 10 aa, synthetic construct
TWERGDFNNT

SEQ ID NO: 149444 - protein, 10 aa, synthetic construct
TWNRGDFNNT

SEQ ID NO: 149445 - protein, 10 aa, synthetic construct
TWQRGDFNNT

SEQ ID NO: 149446 - protein, 10 aa, synthetic construct
TWSRGDFNNT

SEQ ID NO: 149447 - protein, 10 aa, synthetic construct
TWTRGDFNNT

SEQ ID NO: 149448 - protein, 10 aa, synthetic construct
TWFRGDFNNT

SEQ ID NO: 149449 - protein, 10 aa, synthetic construct
TWGRGDFNNT

SEQ ID NO: 149450 - protein, 10 aa, synthetic construct
TWHRGDFNNT

SEQ ID NO: 149451 - protein, 10 aa, synthetic construct
TWIRGDFNNT

SEQ ID NO: 149452 - protein, 10 aa, synthetic construct
TWKRGDFNNT

SEQ ID NO: 149453 - protein, 10 aa, synthetic construct
TWLRGDFNNT

SEQ ID NO: 149454 - protein, 10 aa, synthetic construct
TWMRGDFNNT

SEQ ID NO: 149455 - protein, 10 aa, synthetic construct
TWPRGDFNNT

SEQ ID NO: 149456 - protein, 10 aa, synthetic construct
TWRRGDFNNT

SEQ ID NO: 149457 - protein, 10 aa, synthetic construct
TWVRGDFNNT

SEQ ID NO: 149458 - protein, 10 aa, synthetic construct
TWWRGDFNNT

SEQ ID NO: 149459 - protein, 10 aa, synthetic construct
TWYRGDFNNT

SEQ ID NO: 149460 - protein, 10 aa, synthetic construct
TYARGDFNNT

SEQ ID NO: 149461 - protein, 10 aa, synthetic construct
TYDRGDFNNT

SEQ ID NO: 149462 - protein, 10 aa, synthetic construct
TYERGDFNNT

SEQ ID NO: 149463 - protein, 10 aa, synthetic construct
TYNRGDFNNT

SEQ ID NO: 149464 - protein, 10 aa, synthetic construct
TYQRGDFNNT

SEQ ID NO: 149465 - protein, 10 aa, synthetic construct
TYSRGDFNNT

SEQ ID NO: 149466 - protein, 10 aa, synthetic construct
TYTRGDFNNT

SEQ ID NO: 149467 - protein, 10 aa, synthetic construct
TYFRGDFNNT

SEQ ID NO: 149468 - protein, 10 aa, synthetic construct
TYGRGDFNNT

SEQ ID NO: 149469 - protein, 10 aa, synthetic construct
TYHRGDFNNT

SEQ ID NO: 149470 - protein, 10 aa, synthetic construct
TYIRGDFNNT

SEQ ID NO: 149471 - protein, 10 aa, synthetic construct
TYKRGDFNNT

SEQ ID NO: 149472 - protein, 10 aa, synthetic construct
TYLRGDFNNT

SEQ ID NO: 149473 - protein, 10 aa, synthetic construct
TYMRGDFNNT

SEQ ID NO: 149474 - protein, 10 aa, synthetic construct
TYPRGDFNNT

SEQ ID NO: 149475 - protein, 10 aa, synthetic construct
TYRRGDFNNT

SEQ ID NO: 149476 - protein, 10 aa, synthetic construct
TYVRGDFNNT

SEQ ID NO: 149477 - protein, 10 aa, synthetic construct
TYWRGDFNNT

SEQ ID NO: 149478 - protein, 10 aa, synthetic construct
TYYRGDFNNT

SEQ ID NO: 149479 - protein, 10 aa, synthetic construct
AAARGDFNNL

SEQ ID NO: 149480 - protein, 10 aa, synthetic construct
AADRGDFNNL

SEQ ID NO: 149481 - protein, 10 aa, synthetic construct
AAERGDFNNL

SEQ ID NO: 149482 - protein, 10 aa, synthetic construct
AANRGDFNNL

SEQ ID NO: 149483 - protein, 10 aa, synthetic construct
AAQRGDFNNL

SEQ ID NO: 149484 - protein, 10 aa, synthetic construct
AASRGDFNNL

SEQ ID NO: 149485 - protein, 10 aa, synthetic construct
AATRGDFNNL

SEQ ID NO: 149486 - protein, 10 aa, synthetic construct
AAFRGDFNNL

SEQ ID NO: 149487 - protein, 10 aa, synthetic construct
AAGRGDFNNL

SEQ ID NO: 149488 - protein, 10 aa, synthetic construct
AAHRGDFNNL

SEQ ID NO: 149489 - protein, 10 aa, synthetic construct
AAIRGDFNNL

SEQ ID NO: 149490 - protein, 10 aa, synthetic construct
AAKRGDFNNL

SEQ ID NO: 149491 - protein, 10 aa, synthetic construct
AALRGDFNNL

SEQ ID NO: 149492 - protein, 10 aa, synthetic construct
AAMRGDFNNL

SEQ ID NO: 149493 - protein, 10 aa, synthetic construct
AAPRGDFNNL

SEQ ID NO: 149494 - protein, 10 aa, synthetic construct
AARRGDFNNL

SEQ ID NO: 149495 - protein, 10 aa, synthetic construct
AAVRGDFNNL

SEQ ID NO: 149496 - protein, 10 aa, synthetic construct
AAWRGDFNNL

SEQ ID NO: 149497 - protein, 10 aa, synthetic construct
AAYRGDFNNL

SEQ ID NO: 149498 - protein, 10 aa, synthetic construct
ADARGDFNNL

SEQ ID NO: 149499 - protein, 10 aa, synthetic construct
ADDRGDFNNL

SEQ ID NO: 149500 - protein, 10 aa, synthetic construct
ADERGDFNNL

SEQ ID NO: 149501 - protein, 10 aa, synthetic construct
ADNRGDFNNL

SEQ ID NO: 149502 - protein, 10 aa, synthetic construct
ADQRGDFNNL

SEQ ID NO: 149503 - protein, 10 aa, synthetic construct
ADSRGDFNNL

SEQ ID NO: 149504 - protein, 10 aa, synthetic construct
ADTRGDFNNL

SEQ ID NO: 149505 - protein, 10 aa, synthetic construct
ADFRGDFNNL

SEQ ID NO: 149506 - protein, 10 aa, synthetic construct
ADGRGDFNNL

SEQ ID NO: 149507 - protein, 10 aa, synthetic construct
ADHRGDFNNL

SEQ ID NO: 149508 - protein, 10 aa, synthetic construct
ADIRGDFNNL

SEQ ID NO: 149509 - protein, 10 aa, synthetic construct
ADKRGDFNNL

SEQ ID NO: 149510 - protein, 10 aa, synthetic construct
ADLRGDFNNL

SEQ ID NO: 149511 - protein, 10 aa, synthetic construct
ADMRGDFNNL

SEQ ID NO: 149512 - protein, 10 aa, synthetic construct
ADPRGDFNNL

SEQ ID NO: 149513 - protein, 10 aa, synthetic construct
ADRRGDFNNL

SEQ ID NO: 149514 - protein, 10 aa, synthetic construct
ADVRGDFNNL

SEQ ID NO: 149515 - protein, 10 aa, synthetic construct
ADWRGDFNNL

SEQ ID NO: 149516 - protein, 10 aa, synthetic construct
ADYRGDFNNL

SEQ ID NO: 149517 - protein, 10 aa, synthetic construct
AEARGDFNNL

SEQ ID NO: 149518 - protein, 10 aa, synthetic construct
AEDRGDFNNL

SEQ ID NO: 149519 - protein, 10 aa, synthetic construct
AEERGDFNNL

SEQ ID NO: 149520 - protein, 10 aa, synthetic construct
AENRGDFNNL

SEQ ID NO: 149521 - protein, 10 aa, synthetic construct
AEQRGDFNNL

SEQ ID NO: 149522 - protein, 10 aa, synthetic construct
AESRGDFNNL

SEQ ID NO: 149523 - protein, 10 aa, synthetic construct
AETRGDFNNL

SEQ ID NO: 149524 - protein, 10 aa, synthetic construct
AEFRGDFNNL

SEQ ID NO: 149525 - protein, 10 aa, synthetic construct
AEGRGDFNNL

SEQ ID NO: 149526 - protein, 10 aa, synthetic construct
AEHRGDFNNL

SEQ ID NO: 149527 - protein, 10 aa, synthetic construct
AEIRGDFNNL

SEQ ID NO: 149528 - protein, 10 aa, synthetic construct
AEKRGDFNNL

SEQ ID NO: 149529 - protein, 10 aa, synthetic construct
AELRGDFNNL

SEQ ID NO: 149530 - protein, 10 aa, synthetic construct
AEMRGDFNNL

SEQ ID NO: 149531 - protein, 10 aa, synthetic construct
AEPRGDFNNL

SEQ ID NO: 149532 - protein, 10 aa, synthetic construct
AERRGDFNNL

SEQ ID NO: 149533 - protein, 10 aa, synthetic construct
AEVRGDFNNL

SEQ ID NO: 149534 - protein, 10 aa, synthetic construct
AEWRGDFNNL

SEQ ID NO: 149535 - protein, 10 aa, synthetic construct
AEYRGDFNNL

SEQ ID NO: 149536 - protein, 10 aa, synthetic construct
ANARGDFNNL

SEQ ID NO: 149537 - protein, 10 aa, synthetic construct
ANDRGDFNNL

SEQ ID NO: 149538 - protein, 10 aa, synthetic construct
ANERGDFNNL

SEQ ID NO: 149539 - protein, 10 aa, synthetic construct
ANNRGDFNNL

SEQ ID NO: 149540 - protein, 10 aa, synthetic construct
ANQRGDFNNL

SEQ ID NO: 149541 - protein, 10 aa, synthetic construct
ANSRGDFNNL

SEQ ID NO: 149542 - protein, 10 aa, synthetic construct
ANTRGDFNNL

SEQ ID NO: 149543 - protein, 10 aa, synthetic construct
ANFRGDFNNL

SEQ ID NO: 149544 - protein, 10 aa, synthetic construct
ANGRGDFNNL

SEQ ID NO: 149545 - protein, 10 aa, synthetic construct
ANHRGDFNNL

SEQ ID NO: 149546 - protein, 10 aa, synthetic construct
ANIRGDFNNL

SEQ ID NO: 149547 - protein, 10 aa, synthetic construct
ANKRGDFNNL

SEQ ID NO: 149548 - protein, 10 aa, synthetic construct
ANLRGDFNNL

SEQ ID NO: 149549 - protein, 10 aa, synthetic construct
ANMRGDFNNL

SEQ ID NO: 149550 - protein, 10 aa, synthetic construct
ANPRGDFNNL

SEQ ID NO: 149551 - protein, 10 aa, synthetic construct
ANRRGDFNNL

SEQ ID NO: 149552 - protein, 10 aa, synthetic construct
ANVRGDFNNL

SEQ ID NO: 149553 - protein, 10 aa, synthetic construct
ANWRGDFNNL

SEQ ID NO: 149554 - protein, 10 aa, synthetic construct
ANYRGDFNNL

SEQ ID NO: 149555 - protein, 10 aa, synthetic construct
AQARGDFNNL

SEQ ID NO: 149556 - protein, 10 aa, synthetic construct
AQDRGDFNNL

SEQ ID NO: 149557 - protein, 10 aa, synthetic construct
AQERGDFNNL

SEQ ID NO: 149558 - protein, 10 aa, synthetic construct
AQNRGDFNNL

SEQ ID NO: 149559 - protein, 10 aa, synthetic construct
AQQRGDFNNL

SEQ ID NO: 149560 - protein, 10 aa, synthetic construct
AQSRGDFNNL

SEQ ID NO: 149561 - protein, 10 aa, synthetic construct
AQTRGDFNNL

SEQ ID NO: 149562 - protein, 10 aa, synthetic construct
AQFRGDFNNL

SEQ ID NO: 149563 - protein, 10 aa, synthetic construct
AQGRGDFNNL

SEQ ID NO: 149564 - protein, 10 aa, synthetic construct
AQHRGDFNNL

SEQ ID NO: 149565 - protein, 10 aa, synthetic construct
AQIRGDFNNL

SEQ ID NO: 149566 - protein, 10 aa, synthetic construct
AQKRGDFNNL

SEQ ID NO: 149567 - protein, 10 aa, synthetic construct
AQLRGDFNNL

SEQ ID NO: 149568 - protein, 10 aa, synthetic construct
AQMRGDFNNL

SEQ ID NO: 149569 - protein, 10 aa, synthetic construct
AQPRGDFNNL

SEQ ID NO: 149570 - protein, 10 aa, synthetic construct
AQRRGDFNNL

SEQ ID NO: 149571 - protein, 10 aa, synthetic construct
AQVRGDFNNL

SEQ ID NO: 149572 - protein, 10 aa, synthetic construct
AQWRGDFNNL

SEQ ID NO: 149573 - protein, 10 aa, synthetic construct
AQYRGDFNNL

SEQ ID NO: 149574 - protein, 10 aa, synthetic construct
ASARGDFNNL

SEQ ID NO: 149575 - protein, 10 aa, synthetic construct
ASDRGDFNNL

SEQ ID NO: 149576 - protein, 10 aa, synthetic construct
ASERGDFNNL

SEQ ID NO: 149577 - protein, 10 aa, synthetic construct
ASNRGDFNNL

SEQ ID NO: 149578 - protein, 10 aa, synthetic construct
ASQRGDFNNL

SEQ ID NO: 149579 - protein, 10 aa, synthetic construct
ASSRGDFNNL

SEQ ID NO: 149580 - protein, 10 aa, synthetic construct
ASTRGDFNNL

SEQ ID NO: 149581 - protein, 10 aa, synthetic construct
ASFRGDFNNL

SEQ ID NO: 149582 - protein, 10 aa, synthetic construct
ASGRGDFNNL

SEQ ID NO: 149583 - protein, 10 aa, synthetic construct
ASHRGDFNNL

SEQ ID NO: 149584 - protein, 10 aa, synthetic construct
ASIRGDFNNL

SEQ ID NO: 149585 - protein, 10 aa, synthetic construct
ASKRGDFNNL

SEQ ID NO: 149586 - protein, 10 aa, synthetic construct
ASLRGDFNNL

SEQ ID NO: 149587 - protein, 10 aa, synthetic construct
ASMRGDFNNL

SEQ ID NO: 149588 - protein, 10 aa, synthetic construct
ASPRGDFNNL

SEQ ID NO: 149589 - protein, 10 aa, synthetic construct
ASRRGDFNNL

SEQ ID NO: 149590 - protein, 10 aa, synthetic construct
ASVRGDFNNL

SEQ ID NO: 149591 - protein, 10 aa, synthetic construct
ASWRGDFNNL

SEQ ID NO: 149592 - protein, 10 aa, synthetic construct
ASYRGDFNNL

SEQ ID NO: 149593 - protein, 10 aa, synthetic construct
ATARGDFNNL

SEQ ID NO: 149594 - protein, 10 aa, synthetic construct
ATDRGDFNNL

SEQ ID NO: 149595 - protein, 10 aa, synthetic construct
ATERGDFNNL

SEQ ID NO: 149596 - protein, 10 aa, synthetic construct
ATNRGDFNNL

SEQ ID NO: 149597 - protein, 10 aa, synthetic construct
ATQRGDFNNL

SEQ ID NO: 149598 - protein, 10 aa, synthetic construct
ATSRGDFNNL

SEQ ID NO: 149599 - protein, 10 aa, synthetic construct
ATTRGDFNNL

SEQ ID NO: 149600 - protein, 10 aa, synthetic construct
ATFRGDFNNL

SEQ ID NO: 149601 - protein, 10 aa, synthetic construct
ATGRGDFNNL

SEQ ID NO: 149602 - protein, 10 aa, synthetic construct
ATHRGDFNNL

SEQ ID NO: 149603 - protein, 10 aa, synthetic construct
ATIRGDFNNL

SEQ ID NO: 149604 - protein, 10 aa, synthetic construct
ATKRGDFNNL

SEQ ID NO: 149605 - protein, 10 aa, synthetic construct
ATLRGDFNNL

SEQ ID NO: 149606 - protein, 10 aa, synthetic construct
ATMRGDFNNL

SEQ ID NO: 149607 - protein, 10 aa, synthetic construct
ATPRGDFNNL

SEQ ID NO: 149608 - protein, 10 aa, synthetic construct
ATRRGDFNNL

SEQ ID NO: 149609 - protein, 10 aa, synthetic construct
ATVRGDFNNL

SEQ ID NO: 149610 - protein, 10 aa, synthetic construct
ATWRGDFNNL

SEQ ID NO: 149611 - protein, 10 aa, synthetic construct
ATYRGDFNNL

SEQ ID NO: 149612 - protein, 10 aa, synthetic construct
AFARGDFNNL

SEQ ID NO: 149613 - protein, 10 aa, synthetic construct
AFDRGDFNNL

SEQ ID NO: 149614 - protein, 10 aa, synthetic construct
AFERGDFNNL

SEQ ID NO: 149615 - protein, 10 aa, synthetic construct
AFNRGDFNNL

SEQ ID NO: 149616 - protein, 10 aa, synthetic construct
AFQRGDFNNL

SEQ ID NO: 149617 - protein, 10 aa, synthetic construct
AFSRGDFNNL

SEQ ID NO: 149618 - protein, 10 aa, synthetic construct
AFTRGDFNNL

SEQ ID NO: 149619 - protein, 10 aa, synthetic construct
AFFRGDFNNL

SEQ ID NO: 149620 - protein, 10 aa, synthetic construct
AFGRGDFNNL

SEQ ID NO: 149621 - protein, 10 aa, synthetic construct
AFHRGDFNNL

SEQ ID NO: 149622 - protein, 10 aa, synthetic construct
AFIRGDFNNL

SEQ ID NO: 149623 - protein, 10 aa, synthetic construct
AFKRGDFNNL

SEQ ID NO: 149624 - protein, 10 aa, synthetic construct
AFLRGDFNNL

SEQ ID NO: 149625 - protein, 10 aa, synthetic construct
AFMRGDFNNL

SEQ ID NO: 149626 - protein, 10 aa, synthetic construct
AFPRGDFNNL

SEQ ID NO: 149627 - protein, 10 aa, synthetic construct
AFRRGDFNNL

SEQ ID NO: 149628 - protein, 10 aa, synthetic construct
AFVRGDFNNL

SEQ ID NO: 149629 - protein, 10 aa, synthetic construct
AFWRGDFNNL

SEQ ID NO: 149630 - protein, 10 aa, synthetic construct
AFYRGDFNNL

SEQ ID NO: 149631 - protein, 10 aa, synthetic construct
AGARGDFNNL

SEQ ID NO: 149632 - protein, 10 aa, synthetic construct
AGDRGDFNNL

SEQ ID NO: 149633 - protein, 10 aa, synthetic construct
AGERGDFNNL

SEQ ID NO: 149634 - protein, 10 aa, synthetic construct
AGNRGDFNNL

SEQ ID NO: 149635 - protein, 10 aa, synthetic construct
AGQRGDFNNL

SEQ ID NO: 149636 - protein, 10 aa, synthetic construct
AGSRGDFNNL

SEQ ID NO: 149637 - protein, 10 aa, synthetic construct
AGTRGDFNNL

SEQ ID NO: 149638 - protein, 10 aa, synthetic construct
AGFRGDFNNL

SEQ ID NO: 149639 - protein, 10 aa, synthetic construct
AGGRGDFNNL

SEQ ID NO: 149640 - protein, 10 aa, synthetic construct
AGHRGDFNNL

SEQ ID NO: 149641 - protein, 10 aa, synthetic construct
AGIRGDFNNL

SEQ ID NO: 149642 - protein, 10 aa, synthetic construct
AGKRGDFNNL

SEQ ID NO: 149643 - protein, 10 aa, synthetic construct
AGLRGDFNNL

SEQ ID NO: 149644 - protein, 10 aa, synthetic construct
AGMRGDFNNL

SEQ ID NO: 149645 - protein, 10 aa, synthetic construct
AGPRGDFNNL

SEQ ID NO: 149646 - protein, 10 aa, synthetic construct
AGRRGDFNNL

SEQ ID NO: 149647 - protein, 10 aa, synthetic construct
AGVRGDFNNL

SEQ ID NO: 149648 - protein, 10 aa, synthetic construct
AGWRGDFNNL

SEQ ID NO: 149649 - protein, 10 aa, synthetic construct
AGYRGDFNNL

SEQ ID NO: 149650 - protein, 10 aa, synthetic construct
AHARGDFNNL

SEQ ID NO: 149651 - protein, 10 aa, synthetic construct
AHDRGDFNNL

SEQ ID NO: 149652 - protein, 10 aa, synthetic construct
AHERGDFNNL

SEQ ID NO: 149653 - protein, 10 aa, synthetic construct
AHNRGDFNNL

SEQ ID NO: 149654 - protein, 10 aa, synthetic construct
AHQRGDFNNL

SEQ ID NO: 149655 - protein, 10 aa, synthetic construct
AHSRGDFNNL

SEQ ID NO: 149656 - protein, 10 aa, synthetic construct
AHTRGDFNNL

SEQ ID NO: 149657 - protein, 10 aa, synthetic construct
AHFRGDFNNL

SEQ ID NO: 149658 - protein, 10 aa, synthetic construct
AHGRGDFNNL

SEQ ID NO: 149659 - protein, 10 aa, synthetic construct
AHHRGDFNNL

SEQ ID NO: 149660 - protein, 10 aa, synthetic construct
AHIRGDFNNL

SEQ ID NO: 149661 - protein, 10 aa, synthetic construct
AHKRGDFNNL

SEQ ID NO: 149662 - protein, 10 aa, synthetic construct
AHLRGDFNNL

SEQ ID NO: 149663 - protein, 10 aa, synthetic construct
AHMRGDFNNL

SEQ ID NO: 149664 - protein, 10 aa, synthetic construct
AHPRGDFNNL

SEQ ID NO: 149665 - protein, 10 aa, synthetic construct
AHRRGDFNNL

SEQ ID NO: 149666 - protein, 10 aa, synthetic construct
AHVRGDFNNL

SEQ ID NO: 149667 - protein, 10 aa, synthetic construct
AHWRGDFNNL

SEQ ID NO: 149668 - protein, 10 aa, synthetic construct
AHYRGDFNNL

SEQ ID NO: 149669 - protein, 10 aa, synthetic construct
AIARGDFNNL

SEQ ID NO: 149670 - protein, 10 aa, synthetic construct
AIDRGDFNNL

SEQ ID NO: 149671 - protein, 10 aa, synthetic construct
AIERGDFNNL

SEQ ID NO: 149672 - protein, 10 aa, synthetic construct
AINRGDFNNL

SEQ ID NO: 149673 - protein, 10 aa, synthetic construct
AIQRGDFNNL

SEQ ID NO: 149674 - protein, 10 aa, synthetic construct
AISRGDFNNL

SEQ ID NO: 149675 - protein, 10 aa, synthetic construct
AITRGDFNNL

SEQ ID NO: 149676 - protein, 10 aa, synthetic construct
AIFRGDFNNL

SEQ ID NO: 149677 - protein, 10 aa, synthetic construct
AIGRGDFNNL

SEQ ID NO: 149678 - protein, 10 aa, synthetic construct
AIHRGDFNNL

SEQ ID NO: 149679 - protein, 10 aa, synthetic construct
AIIRGDFNNL

SEQ ID NO: 149680 - protein, 10 aa, synthetic construct
AIKRGDFNNL

SEQ ID NO: 149681 - protein, 10 aa, synthetic construct
AILRGDFNNL

SEQ ID NO: 149682 - protein, 10 aa, synthetic construct
AIMRGDFNNL

SEQ ID NO: 149683 - protein, 10 aa, synthetic construct
AIPRGDFNNL

SEQ ID NO: 149684 - protein, 10 aa, synthetic construct
AIRRGDFNNL

SEQ ID NO: 149685 - protein, 10 aa, synthetic construct
AIVRGDFNNL

SEQ ID NO: 149686 - protein, 10 aa, synthetic construct
AIWRGDFNNL

SEQ ID NO: 149687 - protein, 10 aa, synthetic construct
AIYRGDFNNL

SEQ ID NO: 149688 - protein, 10 aa, synthetic construct
AKARGDFNNL

SEQ ID NO: 149689 - protein, 10 aa, synthetic construct
AKDRGDFNNL

SEQ ID NO: 149690 - protein, 10 aa, synthetic construct
AKERGDFNNL

SEQ ID NO: 149691 - protein, 10 aa, synthetic construct
AKNRGDFNNL

SEQ ID NO: 149692 - protein, 10 aa, synthetic construct
AKQRGDFNNL

SEQ ID NO: 149693 - protein, 10 aa, synthetic construct
AKSRGDFNNL

SEQ ID NO: 149694 - protein, 10 aa, synthetic construct
AKTRGDFNNL

SEQ ID NO: 149695 - protein, 10 aa, synthetic construct
AKFRGDFNNL

SEQ ID NO: 149696 - protein, 10 aa, synthetic construct
AKGRGDFNNL

SEQ ID NO: 149697 - protein, 10 aa, synthetic construct
AKHRGDFNNL

SEQ ID NO: 149698 - protein, 10 aa, synthetic construct
AKIRGDFNNL

SEQ ID NO: 149699 - protein, 10 aa, synthetic construct
AKKRGDFNNL

SEQ ID NO: 149700 - protein, 10 aa, synthetic construct
AKLRGDFNNL

SEQ ID NO: 149701 - protein, 10 aa, synthetic construct
AKMRGDFNNL

SEQ ID NO: 149702 - protein, 10 aa, synthetic construct
AKPRGDFNNL

SEQ ID NO: 149703 - protein, 10 aa, synthetic construct
AKRRGDFNNL

SEQ ID NO: 149704 - protein, 10 aa, synthetic construct
AKVRGDFNNL

SEQ ID NO: 149705 - protein, 10 aa, synthetic construct
AKWRGDFNNL

SEQ ID NO: 149706 - protein, 10 aa, synthetic construct
AKYRGDFNNL

SEQ ID NO: 149707 - protein, 10 aa, synthetic construct
ALARGDFNNL

SEQ ID NO: 149708 - protein, 10 aa, synthetic construct
ALDRGDFNNL

SEQ ID NO: 149709 - protein, 10 aa, synthetic construct
ALERGDFNNL

SEQ ID NO: 149710 - protein, 10 aa, synthetic construct
ALNRGDFNNL

SEQ ID NO: 149711 - protein, 10 aa, synthetic construct
ALQRGDFNNL

SEQ ID NO: 149712 - protein, 10 aa, synthetic construct
ALSRGDFNNL

SEQ ID NO: 149713 - protein, 10 aa, synthetic construct
ALTRGDFNNL

SEQ ID NO: 149714 - protein, 10 aa, synthetic construct
ALFRGDFNNL

SEQ ID NO: 149715 - protein, 10 aa, synthetic construct
ALGRGDFNNL

SEQ ID NO: 149716 - protein, 10 aa, synthetic construct
ALHRGDFNNL

SEQ ID NO: 149717 - protein, 10 aa, synthetic construct
ALIRGDFNNL

SEQ ID NO: 149718 - protein, 10 aa, synthetic construct
ALKRGDFNNL

SEQ ID NO: 149719 - protein, 10 aa, synthetic construct
ALLRGDFNNL

SEQ ID NO: 149720 - protein, 10 aa, synthetic construct
ALMRGDFNNL

SEQ ID NO: 149721 - protein, 10 aa, synthetic construct
ALPRGDFNNL

SEQ ID NO: 149722 - protein, 10 aa, synthetic construct
ALRRGDFNNL

SEQ ID NO: 149723 - protein, 10 aa, synthetic construct
ALVRGDFNNL

SEQ ID NO: 149724 - protein, 10 aa, synthetic construct
ALWRGDFNNL

SEQ ID NO: 149725 - protein, 10 aa, synthetic construct
ALYRGDFNNL

SEQ ID NO: 149726 - protein, 10 aa, synthetic construct
AMARGDFNNL

SEQ ID NO: 149727 - protein, 10 aa, synthetic construct
AMDRGDFNNL

SEQ ID NO: 149728 - protein, 10 aa, synthetic construct
AMERGDFNNL

SEQ ID NO: 149729 - protein, 10 aa, synthetic construct
AMNRGDFNNL

SEQ ID NO: 149730 - protein, 10 aa, synthetic construct
AMQRGDFNNL

SEQ ID NO: 149731 - protein, 10 aa, synthetic construct
AMSRGDFNNL

SEQ ID NO: 149732 - protein, 10 aa, synthetic construct
AMTRGDFNNL

SEQ ID NO: 149733 - protein, 10 aa, synthetic construct
AMFRGDFNNL

SEQ ID NO: 149734 - protein, 10 aa, synthetic construct
AMGRGDFNNL

SEQ ID NO: 149735 - protein, 10 aa, synthetic construct
AMHRGDFNNL

SEQ ID NO: 149736 - protein, 10 aa, synthetic construct
AMIRGDFNNL

SEQ ID NO: 149737 - protein, 10 aa, synthetic construct
AMKRGDFNNL

SEQ ID NO: 149738 - protein, 10 aa, synthetic construct
AMLRGDFNNL

SEQ ID NO: 149739 - protein, 10 aa, synthetic construct
AMMRGDFNNL

SEQ ID NO: 149740 - protein, 10 aa, synthetic construct
AMPRGDFNNL

SEQ ID NO: 149741 - protein, 10 aa, synthetic construct
AMRRGDFNNL

SEQ ID NO: 149742 - protein, 10 aa, synthetic construct
AMVRGDFNNL

SEQ ID NO: 149743 - protein, 10 aa, synthetic construct
AMWRGDFNNL

SEQ ID NO: 149744 - protein, 10 aa, synthetic construct
AMYRGDFNNL

SEQ ID NO: 149745 - protein, 10 aa, synthetic construct
APARGDFNNL

SEQ ID NO: 149746 - protein, 10 aa, synthetic construct
APDRGDFNNL

SEQ ID NO: 149747 - protein, 10 aa, synthetic construct
APERGDFNNL

SEQ ID NO: 149748 - protein, 10 aa, synthetic construct
APNRGDFNNL

SEQ ID NO: 149749 - protein, 10 aa, synthetic construct
APQRGDFNNL

SEQ ID NO: 149750 - protein, 10 aa, synthetic construct
APSRGDFNNL

SEQ ID NO: 149751 - protein, 10 aa, synthetic construct
APTRGDFNNL

SEQ ID NO: 149752 - protein, 10 aa, synthetic construct
APFRGDFNNL

SEQ ID NO: 149753 - protein, 10 aa, synthetic construct
APGRGDFNNL

SEQ ID NO: 149754 - protein, 10 aa, synthetic construct
APHRGDFNNL

SEQ ID NO: 149755 - protein, 10 aa, synthetic construct
APIRGDFNNL

SEQ ID NO: 149756 - protein, 10 aa, synthetic construct
APKRGDFNNL

SEQ ID NO: 149757 - protein, 10 aa, synthetic construct
APLRGDFNNL

SEQ ID NO: 149758 - protein, 10 aa, synthetic construct
APMRGDFNNL

SEQ ID NO: 149759 - protein, 10 aa, synthetic construct
APPRGDFNNL

SEQ ID NO: 149760 - protein, 10 aa, synthetic construct
APRRGDFNNL

SEQ ID NO: 149761 - protein, 10 aa, synthetic construct
APVRGDFNNL

SEQ ID NO: 149762 - protein, 10 aa, synthetic construct
APWRGDFNNL

SEQ ID NO: 149763 - protein, 10 aa, synthetic construct
APYRGDFNNL

SEQ ID NO: 149764 - protein, 10 aa, synthetic construct
ARARGDFNNL

SEQ ID NO: 149765 - protein, 10 aa, synthetic construct
ARDRGDFNNL

SEQ ID NO: 149766 - protein, 10 aa, synthetic construct
ARERGDFNNL

SEQ ID NO: 149767 - protein, 10 aa, synthetic construct
ARNRGDFNNL

SEQ ID NO: 149768 - protein, 10 aa, synthetic construct
ARQRGDFNNL

SEQ ID NO: 149769 - protein, 10 aa, synthetic construct
ARSRGDFNNL

SEQ ID NO: 149770 - protein, 10 aa, synthetic construct
ARTRGDFNNL

SEQ ID NO: 149771 - protein, 10 aa, synthetic construct
ARFRGDFNNL

SEQ ID NO: 149772 - protein, 10 aa, synthetic construct
ARGRGDFNNL

SEQ ID NO: 149773 - protein, 10 aa, synthetic construct
ARHRGDFNNL

SEQ ID NO: 149774 - protein, 10 aa, synthetic construct
ARIRGDFNNL

SEQ ID NO: 149775 - protein, 10 aa, synthetic construct
ARKRGDFNNL

SEQ ID NO: 149776 - protein, 10 aa, synthetic construct
ARLRGDFNNL

SEQ ID NO: 149777 - protein, 10 aa, synthetic construct
ARMRGDFNNL

SEQ ID NO: 149778 - protein, 10 aa, synthetic construct
ARPRGDFNNL

SEQ ID NO: 149779 - protein, 10 aa, synthetic construct
ARRRGDFNNL

SEQ ID NO: 149780 - protein, 10 aa, synthetic construct
ARVRGDFNNL

SEQ ID NO: 149781 - protein, 10 aa, synthetic construct
ARWRGDFNNL

SEQ ID NO: 149782 - protein, 10 aa, synthetic construct
ARYRGDFNNL

SEQ ID NO: 149783 - protein, 10 aa, synthetic construct
AVARGDFNNL

SEQ ID NO: 149784 - protein, 10 aa, synthetic construct
AVDRGDFNNL

SEQ ID NO: 149785 - protein, 10 aa, synthetic construct
AVERGDFNNL

SEQ ID NO: 149786 - protein, 10 aa, synthetic construct
AVNRGDFNNL

SEQ ID NO: 149787 - protein, 10 aa, synthetic construct
AVQRGDFNNL

SEQ ID NO: 149788 - protein, 10 aa, synthetic construct
AVSRGDFNNL

SEQ ID NO: 149789 - protein, 10 aa, synthetic construct
AVTRGDFNNL

SEQ ID NO: 149790 - protein, 10 aa, synthetic construct
AVFRGDFNNL

SEQ ID NO: 149791 - protein, 10 aa, synthetic construct
AVGRGDFNNL

SEQ ID NO: 149792 - protein, 10 aa, synthetic construct
AVHRGDFNNL

SEQ ID NO: 149793 - protein, 10 aa, synthetic construct
AVIRGDFNNL

SEQ ID NO: 149794 - protein, 10 aa, synthetic construct
AVKRGDFNNL

SEQ ID NO: 149795 - protein, 10 aa, synthetic construct
AVLRGDFNNL

SEQ ID NO: 149796 - protein, 10 aa, synthetic construct
AVMRGDFNNL

SEQ ID NO: 149797 - protein, 10 aa, synthetic construct
AVPRGDFNNL

SEQ ID NO: 149798 - protein, 10 aa, synthetic construct
AVRRGDFNNL

SEQ ID NO: 149799 - protein, 10 aa, synthetic construct
AVVRGDFNNL

SEQ ID NO: 149800 - protein, 10 aa, synthetic construct
AVWRGDFNNL

SEQ ID NO: 149801 - protein, 10 aa, synthetic construct
AVYRGDFNNL

SEQ ID NO: 149802 - protein, 10 aa, synthetic construct
AWARGDFNNL

SEQ ID NO: 149803 - protein, 10 aa, synthetic construct
AWDRGDFNNL

SEQ ID NO: 149804 - protein, 10 aa, synthetic construct
AWERGDFNNL

SEQ ID NO: 149805 - protein, 10 aa, synthetic construct
AWNRGDFNNL

SEQ ID NO: 149806 - protein, 10 aa, synthetic construct
AWQRGDFNNL

SEQ ID NO: 149807 - protein, 10 aa, synthetic construct
AWSRGDFNNL

SEQ ID NO: 149808 - protein, 10 aa, synthetic construct
AWTRGDFNNL

SEQ ID NO: 149809 - protein, 10 aa, synthetic construct
AWFRGDFNNL

SEQ ID NO: 149810 - protein, 10 aa, synthetic construct
AWGRGDFNNL

SEQ ID NO: 149811 - protein, 10 aa, synthetic construct
AWHRGDFNNL

SEQ ID NO: 149812 - protein, 10 aa, synthetic construct
AWIRGDFNNL

SEQ ID NO: 149813 - protein, 10 aa, synthetic construct
AWKRGDFNNL

SEQ ID NO: 149814 - protein, 10 aa, synthetic construct
AWLRGDFNNL

SEQ ID NO: 149815 - protein, 10 aa, synthetic construct
AWMRGDFNNL

SEQ ID NO: 149816 - protein, 10 aa, synthetic construct
AWPRGDFNNL

SEQ ID NO: 149817 - protein, 10 aa, synthetic construct
AWRRGDFNNL

SEQ ID NO: 149818 - protein, 10 aa, synthetic construct
AWVRGDFNNL

SEQ ID NO: 149819 - protein, 10 aa, synthetic construct
AWWRGDFNNL

SEQ ID NO: 149820 - protein, 10 aa, synthetic construct
AWYRGDFNNL

SEQ ID NO: 149821 - protein, 10 aa, synthetic construct
AYARGDFNNL

SEQ ID NO: 149822 - protein, 10 aa, synthetic construct
AYDRGDFNNL

SEQ ID NO: 149823 - protein, 10 aa, synthetic construct
AYERGDFNNL

SEQ ID NO: 149824 - protein, 10 aa, synthetic construct
AYNRGDFNNL

SEQ ID NO: 149825 - protein, 10 aa, synthetic construct
AYQRGDFNNL

SEQ ID NO: 149826 - protein, 10 aa, synthetic construct
AYSRGDFNNL

SEQ ID NO: 149827 - protein, 10 aa, synthetic construct
AYTRGDFNNL

SEQ ID NO: 149828 - protein, 10 aa, synthetic construct
AYFRGDFNNL

SEQ ID NO: 149829 - protein, 10 aa, synthetic construct
AYGRGDFNNL

SEQ ID NO: 149830 - protein, 10 aa, synthetic construct
AYHRGDFNNL

SEQ ID NO: 149831 - protein, 10 aa, synthetic construct
AYIRGDFNNL

SEQ ID NO: 149832 - protein, 10 aa, synthetic construct
AYKRGDFNNL

SEQ ID NO: 149833 - protein, 10 aa, synthetic construct
AYLRGDFNNL

SEQ ID NO: 149834 - protein, 10 aa, synthetic construct
AYMRGDFNNL

SEQ ID NO: 149835 - protein, 10 aa, synthetic construct
AYPRGDFNNL

SEQ ID NO: 149836 - protein, 10 aa, synthetic construct
AYRRGDFNNL

SEQ ID NO: 149837 - protein, 10 aa, synthetic construct
AYVRGDFNNL

SEQ ID NO: 149838 - protein, 10 aa, synthetic construct
AYWRGDFNNL

SEQ ID NO: 149839 - protein, 10 aa, synthetic construct
AYYRGDFNNL

SEQ ID NO: 149840 - protein, 10 aa, synthetic construct
DAARGDFNNL

SEQ ID NO: 149841 - protein, 10 aa, synthetic construct
DADRGDFNNL

SEQ ID NO: 149842 - protein, 10 aa, synthetic construct
DAERGDFNNL

SEQ ID NO: 149843 - protein, 10 aa, synthetic construct
DANRGDFNNL

SEQ ID NO: 149844 - protein, 10 aa, synthetic construct
DAQRGDFNNL

SEQ ID NO: 149845 - protein, 10 aa, synthetic construct
DASRGDFNNL

SEQ ID NO: 149846 - protein, 10 aa, synthetic construct
DATRGDFNNL

SEQ ID NO: 149847 - protein, 10 aa, synthetic construct
DAFRGDFNNL

SEQ ID NO: 149848 - protein, 10 aa, synthetic construct
DAGRGDFNNL

SEQ ID NO: 149849 - protein, 10 aa, synthetic construct
DAHRGDFNNL

SEQ ID NO: 149850 - protein, 10 aa, synthetic construct
DAIRGDFNNL

SEQ ID NO: 149851 - protein, 10 aa, synthetic construct
DAKRGDFNNL

SEQ ID NO: 149852 - protein, 10 aa, synthetic construct
DALRGDFNNL

SEQ ID NO: 149853 - protein, 10 aa, synthetic construct
DAMRGDFNNL

SEQ ID NO: 149854 - protein, 10 aa, synthetic construct
DAPRGDFNNL

SEQ ID NO: 149855 - protein, 10 aa, synthetic construct
DARRGDFNNL

SEQ ID NO: 149856 - protein, 10 aa, synthetic construct
DAVRGDFNNL

SEQ ID NO: 149857 - protein, 10 aa, synthetic construct
DAWRGDFNNL

SEQ ID NO: 149858 - protein, 10 aa, synthetic construct
DAYRGDFNNL

SEQ ID NO: 149859 - protein, 10 aa, synthetic construct
DDARGDFNNL

SEQ ID NO: 149860 - protein, 10 aa, synthetic construct
DDDRGDFNNL

SEQ ID NO: 149861 - protein, 10 aa, synthetic construct
DDERGDFNNL

SEQ ID NO: 149862 - protein, 10 aa, synthetic construct
DDNRGDFNNL

SEQ ID NO: 149863 - protein, 10 aa, synthetic construct
DDQRGDFNNL

SEQ ID NO: 149864 - protein, 10 aa, synthetic construct
DDSRGDFNNL

SEQ ID NO: 149865 - protein, 10 aa, synthetic construct
DDTRGDFNNL

SEQ ID NO: 149866 - protein, 10 aa, synthetic construct
DDFRGDFNNL

SEQ ID NO: 149867 - protein, 10 aa, synthetic construct
DDGRGDFNNL

SEQ ID NO: 149868 - protein, 10 aa, synthetic construct
DDHRGDFNNL

SEQ ID NO: 149869 - protein, 10 aa, synthetic construct
DDIRGDFNNL

SEQ ID NO: 149870 - protein, 10 aa, synthetic construct
DDKRGDFNNL

SEQ ID NO: 149871 - protein, 10 aa, synthetic construct
DDLRGDFNNL

SEQ ID NO: 149872 - protein, 10 aa, synthetic construct
DDMRGDFNNL

SEQ ID NO: 149873 - protein, 10 aa, synthetic construct
DDPRGDFNNL

SEQ ID NO: 149874 - protein, 10 aa, synthetic construct
DDRRGDFNNL

SEQ ID NO: 149875 - protein, 10 aa, synthetic construct
DDVRGDFNNL

SEQ ID NO: 149876 - protein, 10 aa, synthetic construct
DDWRGDFNNL

SEQ ID NO: 149877 - protein, 10 aa, synthetic construct
DDYRGDFNNL

SEQ ID NO: 149878 - protein, 10 aa, synthetic construct
DEARGDFNNL

SEQ ID NO: 149879 - protein, 10 aa, synthetic construct
DEDRGDFNNL

SEQ ID NO: 149880 - protein, 10 aa, synthetic construct
DEERGDFNNL

SEQ ID NO: 149881 - protein, 10 aa, synthetic construct
DENRGDFNNL

SEQ ID NO: 149882 - protein, 10 aa, synthetic construct
DEQRGDFNNL

SEQ ID NO: 149883 - protein, 10 aa, synthetic construct
DESRGDFNNL

SEQ ID NO: 149884 - protein, 10 aa, synthetic construct
DETRGDFNNL

SEQ ID NO: 149885 - protein, 10 aa, synthetic construct
DEFRGDFNNL

SEQ ID NO: 149886 - protein, 10 aa, synthetic construct
DEGRGDFNNL

SEQ ID NO: 149887 - protein, 10 aa, synthetic construct
DEHRGDFNNL

SEQ ID NO: 149888 - protein, 10 aa, synthetic construct
DEIRGDFNNL

SEQ ID NO: 149889 - protein, 10 aa, synthetic construct
DEKRGDFNNL

SEQ ID NO: 149890 - protein, 10 aa, synthetic construct
DELRGDFNNL

SEQ ID NO: 149891 - protein, 10 aa, synthetic construct
DEMRGDFNNL

SEQ ID NO: 149892 - protein, 10 aa, synthetic construct
DEPRGDFNNL

SEQ ID NO: 149893 - protein, 10 aa, synthetic construct
DERRGDFNNL

SEQ ID NO: 149894 - protein, 10 aa, synthetic construct
DEVRGDFNNL

SEQ ID NO: 149895 - protein, 10 aa, synthetic construct
DEWRGDFNNL

SEQ ID NO: 149896 - protein, 10 aa, synthetic construct
DEYRGDFNNL

SEQ ID NO: 149897 - protein, 10 aa, synthetic construct
DNARGDFNNL

SEQ ID NO: 149898 - protein, 10 aa, synthetic construct
DNDRGDFNNL

SEQ ID NO: 149899 - protein, 10 aa, synthetic construct
DNERGDFNNL

SEQ ID NO: 149900 - protein, 10 aa, synthetic construct
DNNRGDFNNL

SEQ ID NO: 149901 - protein, 10 aa, synthetic construct
DNQRGDFNNL

SEQ ID NO: 149902 - protein, 10 aa, synthetic construct
DNSRGDFNNL

SEQ ID NO: 149903 - protein, 10 aa, synthetic construct
DNTRGDFNNL

SEQ ID NO: 149904 - protein, 10 aa, synthetic construct
DNFRGDFNNL

SEQ ID NO: 149905 - protein, 10 aa, synthetic construct
DNGRGDFNNL

SEQ ID NO: 149906 - protein, 10 aa, synthetic construct
DNHRGDFNNL

SEQ ID NO: 149907 - protein, 10 aa, synthetic construct
DNIRGDFNNL

SEQ ID NO: 149908 - protein, 10 aa, synthetic construct
DNKRGDFNNL

SEQ ID NO: 149909 - protein, 10 aa, synthetic construct
DNLRGDFNNL

SEQ ID NO: 149910 - protein, 10 aa, synthetic construct
DNMRGDFNNL

SEQ ID NO: 149911 - protein, 10 aa, synthetic construct
DNPRGDFNNL

SEQ ID NO: 149912 - protein, 10 aa, synthetic construct
DNRRGDFNNL

SEQ ID NO: 149913 - protein, 10 aa, synthetic construct
DNVRGDFNNL

SEQ ID NO: 149914 - protein, 10 aa, synthetic construct
DNWRGDFNNL

SEQ ID NO: 149915 - protein, 10 aa, synthetic construct
DNYRGDFNNL

SEQ ID NO: 149916 - protein, 10 aa, synthetic construct
DQARGDFNNL

SEQ ID NO: 149917 - protein, 10 aa, synthetic construct
DQDRGDFNNL

SEQ ID NO: 149918 - protein, 10 aa, synthetic construct
DQERGDFNNL

SEQ ID NO: 149919 - protein, 10 aa, synthetic construct
DQNRGDFNNL

SEQ ID NO: 149920 - protein, 10 aa, synthetic construct
DQQRGDFNNL

SEQ ID NO: 149921 - protein, 10 aa, synthetic construct
DQSRGDFNNL

SEQ ID NO: 149922 - protein, 10 aa, synthetic construct
DQTRGDFNNL

SEQ ID NO: 149923 - protein, 10 aa, synthetic construct
DQFRGDFNNL

SEQ ID NO: 149924 - protein, 10 aa, synthetic construct
DQGRGDFNNL

SEQ ID NO: 149925 - protein, 10 aa, synthetic construct
DQHRGDFNNL

SEQ ID NO: 149926 - protein, 10 aa, synthetic construct
DQIRGDFNNL

SEQ ID NO: 149927 - protein, 10 aa, synthetic construct
DQKRGDFNNL

SEQ ID NO: 149928 - protein, 10 aa, synthetic construct
DQLRGDFNNL

SEQ ID NO: 149929 - protein, 10 aa, synthetic construct
DQMRGDFNNL

SEQ ID NO: 149930 - protein, 10 aa, synthetic construct
DQPRGDFNNL

SEQ ID NO: 149931 - protein, 10 aa, synthetic construct
DQRRGDFNNL

SEQ ID NO: 149932 - protein, 10 aa, synthetic construct
DQVRGDFNNL

SEQ ID NO: 149933 - protein, 10 aa, synthetic construct
DQWRGDFNNL

SEQ ID NO: 149934 - protein, 10 aa, synthetic construct
DQYRGDFNNL

SEQ ID NO: 149935 - protein, 10 aa, synthetic construct
DSARGDFNNL

SEQ ID NO: 149936 - protein, 10 aa, synthetic construct
DSDRGDFNNL

SEQ ID NO: 149937 - protein, 10 aa, synthetic construct
DSERGDFNNL

SEQ ID NO: 149938 - protein, 10 aa, synthetic construct
DSNRGDFNNL

SEQ ID NO: 149939 - protein, 10 aa, synthetic construct
DSQRGDFNNL

SEQ ID NO: 149940 - protein, 10 aa, synthetic construct
DSSRGDFNNL

SEQ ID NO: 149941 - protein, 10 aa, synthetic construct
DSTRGDFNNL

SEQ ID NO: 149942 - protein, 10 aa, synthetic construct
DSFRGDFNNL

SEQ ID NO: 149943 - protein, 10 aa, synthetic construct
DSGRGDFNNL

SEQ ID NO: 149944 - protein, 10 aa, synthetic construct
DSHRGDFNNL

SEQ ID NO: 149945 - protein, 10 aa, synthetic construct
DSIRGDFNNL

SEQ ID NO: 149946 - protein, 10 aa, synthetic construct
DSKRGDFNNL

SEQ ID NO: 149947 - protein, 10 aa, synthetic construct
DSLRGDFNNL

SEQ ID NO: 149948 - protein, 10 aa, synthetic construct
DSMRGDFNNL

SEQ ID NO: 149949 - protein, 10 aa, synthetic construct
DSPRGDFNNL

SEQ ID NO: 149950 - protein, 10 aa, synthetic construct
DSRRGDFNNL

SEQ ID NO: 149951 - protein, 10 aa, synthetic construct
DSVRGDFNNL

SEQ ID NO: 149952 - protein, 10 aa, synthetic construct
DSWRGDFNNL

SEQ ID NO: 149953 - protein, 10 aa, synthetic construct
DSYRGDFNNL

SEQ ID NO: 149954 - protein, 10 aa, synthetic construct
DTARGDFNNL

SEQ ID NO: 149955 - protein, 10 aa, synthetic construct
DTDRGDFNNL

SEQ ID NO: 149956 - protein, 10 aa, synthetic construct
DTERGDFNNL

SEQ ID NO: 149957 - protein, 10 aa, synthetic construct
DTNRGDFNNL

SEQ ID NO: 149958 - protein, 10 aa, synthetic construct
DTQRGDFNNL

SEQ ID NO: 149959 - protein, 10 aa, synthetic construct
DTSRGDFNNL

SEQ ID NO: 149960 - protein, 10 aa, synthetic construct
DTTRGDFNNL

SEQ ID NO: 149961 - protein, 10 aa, synthetic construct
DTFRGDFNNL

SEQ ID NO: 149962 - protein, 10 aa, synthetic construct
DTGRGDFNNL

SEQ ID NO: 149963 - protein, 10 aa, synthetic construct
DTHRGDFNNL

SEQ ID NO: 149964 - protein, 10 aa, synthetic construct
DTIRGDFNNL

SEQ ID NO: 149965 - protein, 10 aa, synthetic construct
DTKRGDFNNL

SEQ ID NO: 149966 - protein, 10 aa, synthetic construct
DTLRGDFNNL

SEQ ID NO: 149967 - protein, 10 aa, synthetic construct
DTMRGDFNNL

SEQ ID NO: 149968 - protein, 10 aa, synthetic construct
DTPRGDFNNL

SEQ ID NO: 149969 - protein, 10 aa, synthetic construct
DTRRGDFNNL

SEQ ID NO: 149970 - protein, 10 aa, synthetic construct
DTVRGDFNNL

SEQ ID NO: 149971 - protein, 10 aa, synthetic construct
DTWRGDFNNL

SEQ ID NO: 149972 - protein, 10 aa, synthetic construct
DTYRGDFNNL

SEQ ID NO: 149973 - protein, 10 aa, synthetic construct
DFARGDFNNL

SEQ ID NO: 149974 - protein, 10 aa, synthetic construct
DFDRGDFNNL

SEQ ID NO: 149975 - protein, 10 aa, synthetic construct
DFERGDFNNL

SEQ ID NO: 149976 - protein, 10 aa, synthetic construct
DFNRGDFNNL

SEQ ID NO: 149977 - protein, 10 aa, synthetic construct
DFQRGDFNNL

SEQ ID NO: 149978 - protein, 10 aa, synthetic construct
DFSRGDFNNL

SEQ ID NO: 149979 - protein, 10 aa, synthetic construct
DFTRGDFNNL

SEQ ID NO: 149980 - protein, 10 aa, synthetic construct
DFFRGDFNNL

SEQ ID NO: 149981 - protein, 10 aa, synthetic construct
DFGRGDFNNL

SEQ ID NO: 149982 - protein, 10 aa, synthetic construct
DFHRGDFNNL

SEQ ID NO: 149983 - protein, 10 aa, synthetic construct
DFIRGDFNNL

SEQ ID NO: 149984 - protein, 10 aa, synthetic construct
DFKRGDFNNL

SEQ ID NO: 149985 - protein, 10 aa, synthetic construct
DFLRGDFNNL

SEQ ID NO: 149986 - protein, 10 aa, synthetic construct
DFMRGDFNNL

SEQ ID NO: 149987 - protein, 10 aa, synthetic construct
DFPRGDFNNL

SEQ ID NO: 149988 - protein, 10 aa, synthetic construct
DFRRGDFNNL

SEQ ID NO: 149989 - protein, 10 aa, synthetic construct
DFVRGDFNNL

SEQ ID NO: 149990 - protein, 10 aa, synthetic construct
DFWRGDFNNL

SEQ ID NO: 149991 - protein, 10 aa, synthetic construct
DFYRGDFNNL

SEQ ID NO: 149992 - protein, 10 aa, synthetic construct
DGARGDFNNL

SEQ ID NO: 149993 - protein, 10 aa, synthetic construct
DGDRGDFNNL

SEQ ID NO: 149994 - protein, 10 aa, synthetic construct
DGERGDFNNL

SEQ ID NO: 149995 - protein, 10 aa, synthetic construct
DGNRGDFNNL

SEQ ID NO: 149996 - protein, 10 aa, synthetic construct
DGQRGDFNNL

SEQ ID NO: 149997 - protein, 10 aa, synthetic construct
DGSRGDFNNL

SEQ ID NO: 149998 - protein, 10 aa, synthetic construct
DGTRGDFNNL

SEQ ID NO: 149999 - protein, 10 aa, synthetic construct
DGFRGDFNNL

SEQ ID NO: 150000 - protein, 10 aa, synthetic construct
DGGRGDFNNL

SEQ ID NO: 150001 - protein, 10 aa, synthetic construct
DGHRGDFNNL

SEQ ID NO: 150002 - protein, 10 aa, synthetic construct
DGIRGDFNNL

SEQ ID NO: 150003 - protein, 10 aa, synthetic construct
DGKRGDFNNL

SEQ ID NO: 150004 - protein, 10 aa, synthetic construct
DGLRGDFNNL

SEQ ID NO: 150005 - protein, 10 aa, synthetic construct
DGMRGDFNNL

SEQ ID NO: 150006 - protein, 10 aa, synthetic construct
DGPRGDFNNL

SEQ ID NO: 150007 - protein, 10 aa, synthetic construct
DGRRGDFNNL

SEQ ID NO: 150008 - protein, 10 aa, synthetic construct
DGVRGDFNNL

SEQ ID NO: 150009 - protein, 10 aa, synthetic construct
DGWRGDFNNL

SEQ ID NO: 150010 - protein, 10 aa, synthetic construct
DGYRGDFNNL

SEQ ID NO: 150011 - protein, 10 aa, synthetic construct
DHARGDFNNL

SEQ ID NO: 150012 - protein, 10 aa, synthetic construct
DHDRGDFNNL

SEQ ID NO: 150013 - protein, 10 aa, synthetic construct
DHERGDFNNL

SEQ ID NO: 150014 - protein, 10 aa, synthetic construct
DHNRGDFNNL

SEQ ID NO: 150015 - protein, 10 aa, synthetic construct
DHQRGDFNNL

SEQ ID NO: 150016 - protein, 10 aa, synthetic construct
DHSRGDFNNL

SEQ ID NO: 150017 - protein, 10 aa, synthetic construct
DHTRGDFNNL

SEQ ID NO: 150018 - protein, 10 aa, synthetic construct
DHFRGDFNNL

SEQ ID NO: 150019 - protein, 10 aa, synthetic construct
DHGRGDFNNL

SEQ ID NO: 150020 - protein, 10 aa, synthetic construct
DHHRGDFNNL

SEQ ID NO: 150021 - protein, 10 aa, synthetic construct
DHIRGDFNNL

SEQ ID NO: 150022 - protein, 10 aa, synthetic construct
DHKRGDFNNL

SEQ ID NO: 150023 - protein, 10 aa, synthetic construct
DHLRGDFNNL

SEQ ID NO: 150024 - protein, 10 aa, synthetic construct
DHMRGDFNNL

SEQ ID NO: 150025 - protein, 10 aa, synthetic construct
DHPRGDFNNL

SEQ ID NO: 150026 - protein, 10 aa, synthetic construct
DHRRGDFNNL

SEQ ID NO: 150027 - protein, 10 aa, synthetic construct
DHVRGDFNNL

SEQ ID NO: 150028 - protein, 10 aa, synthetic construct
DHWRGDFNNL

SEQ ID NO: 150029 - protein, 10 aa, synthetic construct
DHYRGDFNNL

SEQ ID NO: 150030 - protein, 10 aa, synthetic construct
DIARGDFNNL

SEQ ID NO: 150031 - protein, 10 aa, synthetic construct
DIDRGDFNNL

SEQ ID NO: 150032 - protein, 10 aa, synthetic construct
DIERGDFNNL

SEQ ID NO: 150033 - protein, 10 aa, synthetic construct
DINRGDFNNL

SEQ ID NO: 150034 - protein, 10 aa, synthetic construct
DIQRGDFNNL

SEQ ID NO: 150035 - protein, 10 aa, synthetic construct
DISRGDFNNL

SEQ ID NO: 150036 - protein, 10 aa, synthetic construct
DITRGDFNNL

SEQ ID NO: 150037 - protein, 10 aa, synthetic construct
DIFRGDFNNL

SEQ ID NO: 150038 - protein, 10 aa, synthetic construct
DIGRGDFNNL

SEQ ID NO: 150039 - protein, 10 aa, synthetic construct
DIHRGDFNNL

SEQ ID NO: 150040 - protein, 10 aa, synthetic construct
DIIRGDFNNL

SEQ ID NO: 150041 - protein, 10 aa, synthetic construct
DIKRGDFNNL

SEQ ID NO: 150042 - protein, 10 aa, synthetic construct
DILRGDFNNL

SEQ ID NO: 150043 - protein, 10 aa, synthetic construct
DIMRGDFNNL

SEQ ID NO: 150044 - protein, 10 aa, synthetic construct
DIPRGDFNNL

SEQ ID NO: 150045 - protein, 10 aa, synthetic construct
DIRRGDFNNL

SEQ ID NO: 150046 - protein, 10 aa, synthetic construct
DIVRGDFNNL

SEQ ID NO: 150047 - protein, 10 aa, synthetic construct
DIWRGDFNNL

SEQ ID NO: 150048 - protein, 10 aa, synthetic construct
DIYRGDFNNL

SEQ ID NO: 150049 - protein, 10 aa, synthetic construct
DKARGDFNNL

SEQ ID NO: 150050 - protein, 10 aa, synthetic construct
DKDRGDFNNL

SEQ ID NO: 150051 - protein, 10 aa, synthetic construct
DKERGDFNNL

SEQ ID NO: 150052 - protein, 10 aa, synthetic construct
DKNRGDFNNL

SEQ ID NO: 150053 - protein, 10 aa, synthetic construct
DKQRGDFNNL

SEQ ID NO: 150054 - protein, 10 aa, synthetic construct
DKSRGDFNNL

SEQ ID NO: 150055 - protein, 10 aa, synthetic construct
DKTRGDFNNL

SEQ ID NO: 150056 - protein, 10 aa, synthetic construct
DKFRGDFNNL

SEQ ID NO: 150057 - protein, 10 aa, synthetic construct
DKGRGDFNNL

SEQ ID NO: 150058 - protein, 10 aa, synthetic construct
DKHRGDFNNL

SEQ ID NO: 150059 - protein, 10 aa, synthetic construct
DKIRGDFNNL

SEQ ID NO: 150060 - protein, 10 aa, synthetic construct
DKKRGDFNNL

SEQ ID NO: 150061 - protein, 10 aa, synthetic construct
DKLRGDFNNL

SEQ ID NO: 150062 - protein, 10 aa, synthetic construct
DKMRGDFNNL

SEQ ID NO: 150063 - protein, 10 aa, synthetic construct
DKPRGDFNNL

SEQ ID NO: 150064 - protein, 10 aa, synthetic construct
DKRRGDFNNL

SEQ ID NO: 150065 - protein, 10 aa, synthetic construct
DKVRGDFNNL

SEQ ID NO: 150066 - protein, 10 aa, synthetic construct
DKWRGDFNNL

SEQ ID NO: 150067 - protein, 10 aa, synthetic construct
DKYRGDFNNL

SEQ ID NO: 150068 - protein, 10 aa, synthetic construct
DLARGDFNNL

SEQ ID NO: 150069 - protein, 10 aa, synthetic construct
DLDRGDFNNL

SEQ ID NO: 150070 - protein, 10 aa, synthetic construct
DLERGDFNNL

SEQ ID NO: 150071 - protein, 10 aa, synthetic construct
DLNRGDFNNL

SEQ ID NO: 150072 - protein, 10 aa, synthetic construct
DLQRGDFNNL

SEQ ID NO: 150073 - protein, 10 aa, synthetic construct
DLSRGDFNNL

SEQ ID NO: 150074 - protein, 10 aa, synthetic construct
DLTRGDFNNL

SEQ ID NO: 150075 - protein, 10 aa, synthetic construct
DLFRGDFNNL

SEQ ID NO: 150076 - protein, 10 aa, synthetic construct
DLGRGDFNNL

SEQ ID NO: 150077 - protein, 10 aa, synthetic construct
DLHRGDFNNL

SEQ ID NO: 150078 - protein, 10 aa, synthetic construct
DLIRGDFNNL

SEQ ID NO: 150079 - protein, 10 aa, synthetic construct
DLKRGDFNNL

SEQ ID NO: 150080 - protein, 10 aa, synthetic construct
DLLRGDFNNL

SEQ ID NO: 150081 - protein, 10 aa, synthetic construct
DLMRGDFNNL

SEQ ID NO: 150082 - protein, 10 aa, synthetic construct
DLPRGDFNNL

SEQ ID NO: 150083 - protein, 10 aa, synthetic construct
DLRRGDFNNL

SEQ ID NO: 150084 - protein, 10 aa, synthetic construct
DLVRGDFNNL

SEQ ID NO: 150085 - protein, 10 aa, synthetic construct
DLWRGDFNNL

SEQ ID NO: 150086 - protein, 10 aa, synthetic construct
DLYRGDFNNL

SEQ ID NO: 150087 - protein, 10 aa, synthetic construct
DMARGDFNNL

SEQ ID NO: 150088 - protein, 10 aa, synthetic construct
DMDRGDFNNL

SEQ ID NO: 150089 - protein, 10 aa, synthetic construct
DMERGDFNNL

SEQ ID NO: 150090 - protein, 10 aa, synthetic construct
DMNRGDFNNL

SEQ ID NO: 150091 - protein, 10 aa, synthetic construct
DMQRGDFNNL

SEQ ID NO: 150092 - protein, 10 aa, synthetic construct
DMSRGDFNNL

SEQ ID NO: 150093 - protein, 10 aa, synthetic construct
DMTRGDFNNL

SEQ ID NO: 150094 - protein, 10 aa, synthetic construct
DMFRGDFNNL

SEQ ID NO: 150095 - protein, 10 aa, synthetic construct
DMGRGDFNNL

SEQ ID NO: 150096 - protein, 10 aa, synthetic construct
DMHRGDFNNL

SEQ ID NO: 150097 - protein, 10 aa, synthetic construct
DMIRGDFNNL

SEQ ID NO: 150098 - protein, 10 aa, synthetic construct
DMKRGDFNNL

SEQ ID NO: 150099 - protein, 10 aa, synthetic construct
DMLRGDFNNL

SEQ ID NO: 150100 - protein, 10 aa, synthetic construct
DMMRGDFNNL

SEQ ID NO: 150101 - protein, 10 aa, synthetic construct
DMPRGDFNNL

SEQ ID NO: 150102 - protein, 10 aa, synthetic construct
DMRRGDFNNL

SEQ ID NO: 150103 - protein, 10 aa, synthetic construct
DMVRGDFNNL

SEQ ID NO: 150104 - protein, 10 aa, synthetic construct
DMWRGDFNNL

SEQ ID NO: 150105 - protein, 10 aa, synthetic construct
DMYRGDFNNL

SEQ ID NO: 150106 - protein, 10 aa, synthetic construct
DPARGDFNNL

SEQ ID NO: 150107 - protein, 10 aa, synthetic construct
DPDRGDFNNL

SEQ ID NO: 150108 - protein, 10 aa, synthetic construct
DPERGDFNNL

SEQ ID NO: 150109 - protein, 10 aa, synthetic construct
DPNRGDFNNL

SEQ ID NO: 150110 - protein, 10 aa, synthetic construct
DPQRGDFNNL

SEQ ID NO: 150111 - protein, 10 aa, synthetic construct
DPSRGDFNNL

SEQ ID NO: 150112 - protein, 10 aa, synthetic construct
DPTRGDFNNL

SEQ ID NO: 150113 - protein, 10 aa, synthetic construct
DPFRGDFNNL

SEQ ID NO: 150114 - protein, 10 aa, synthetic construct
DPGRGDFNNL

SEQ ID NO: 150115 - protein, 10 aa, synthetic construct
DPHRGDFNNL

SEQ ID NO: 150116 - protein, 10 aa, synthetic construct
DPIRGDFNNL

SEQ ID NO: 150117 - protein, 10 aa, synthetic construct
DPKRGDFNNL

SEQ ID NO: 150118 - protein, 10 aa, synthetic construct
DPLRGDFNNL

SEQ ID NO: 150119 - protein, 10 aa, synthetic construct
DPMRGDFNNL

SEQ ID NO: 150120 - protein, 10 aa, synthetic construct
DPPRGDFNNL

SEQ ID NO: 150121 - protein, 10 aa, synthetic construct
DPRRGDFNNL

SEQ ID NO: 150122 - protein, 10 aa, synthetic construct
DPVRGDFNNL

SEQ ID NO: 150123 - protein, 10 aa, synthetic construct
DPWRGDFNNL

SEQ ID NO: 150124 - protein, 10 aa, synthetic construct
DPYRGDFNNL

SEQ ID NO: 150125 - protein, 10 aa, synthetic construct
DRARGDFNNL

SEQ ID NO: 150126 - protein, 10 aa, synthetic construct
DRDRGDFNNL

SEQ ID NO: 150127 - protein, 10 aa, synthetic construct
DRERGDFNNL

SEQ ID NO: 150128 - protein, 10 aa, synthetic construct
DRNRGDFNNL

SEQ ID NO: 150129 - protein, 10 aa, synthetic construct
DRQRGDFNNL

SEQ ID NO: 150130 - protein, 10 aa, synthetic construct
DRSRGDFNNL

SEQ ID NO: 150131 - protein, 10 aa, synthetic construct
DRTRGDFNNL

SEQ ID NO: 150132 - protein, 10 aa, synthetic construct
DRFRGDFNNL

SEQ ID NO: 150133 - protein, 10 aa, synthetic construct
DRGRGDFNNL

SEQ ID NO: 150134 - protein, 10 aa, synthetic construct
DRHRGDFNNL

SEQ ID NO: 150135 - protein, 10 aa, synthetic construct
DRIRGDFNNL

SEQ ID NO: 150136 - protein, 10 aa, synthetic construct
DRKRGDFNNL

SEQ ID NO: 150137 - protein, 10 aa, synthetic construct
DRLRGDFNNL

SEQ ID NO: 150138 - protein, 10 aa, synthetic construct
DRMRGDFNNL

SEQ ID NO: 150139 - protein, 10 aa, synthetic construct
DRPRGDFNNL

SEQ ID NO: 150140 - protein, 10 aa, synthetic construct
DRRRGDFNNL

SEQ ID NO: 150141 - protein, 10 aa, synthetic construct
DRVRGDFNNL

SEQ ID NO: 150142 - protein, 10 aa, synthetic construct
DRWRGDFNNL

SEQ ID NO: 150143 - protein, 10 aa, synthetic construct
DRYRGDFNNL

SEQ ID NO: 150144 - protein, 10 aa, synthetic construct
DVARGDFNNL

SEQ ID NO: 150145 - protein, 10 aa, synthetic construct
DVDRGDFNNL

SEQ ID NO: 150146 - protein, 10 aa, synthetic construct
DVERGDFNNL

SEQ ID NO: 150147 - protein, 10 aa, synthetic construct
DVNRGDFNNL

SEQ ID NO: 150148 - protein, 10 aa, synthetic construct
DVQRGDFNNL

SEQ ID NO: 150149 - protein, 10 aa, synthetic construct
DVSRGDFNNL

SEQ ID NO: 150150 - protein, 10 aa, synthetic construct
DVTRGDFNNL

SEQ ID NO: 150151 - protein, 10 aa, synthetic construct
DVFRGDFNNL

SEQ ID NO: 150152 - protein, 10 aa, synthetic construct
DVGRGDFNNL

SEQ ID NO: 150153 - protein, 10 aa, synthetic construct
DVHRGDFNNL

SEQ ID NO: 150154 - protein, 10 aa, synthetic construct
DVIRGDFNNL

SEQ ID NO: 150155 - protein, 10 aa, synthetic construct
DVKRGDFNNL

SEQ ID NO: 150156 - protein, 10 aa, synthetic construct
DVLRGDFNNL

SEQ ID NO: 150157 - protein, 10 aa, synthetic construct
DVMRGDFNNL

SEQ ID NO: 150158 - protein, 10 aa, synthetic construct
DVPRGDFNNL

SEQ ID NO: 150159 - protein, 10 aa, synthetic construct
DVRRGDFNNL

SEQ ID NO: 150160 - protein, 10 aa, synthetic construct
DVVRGDFNNL

SEQ ID NO: 150161 - protein, 10 aa, synthetic construct
DVWRGDFNNL

SEQ ID NO: 150162 - protein, 10 aa, synthetic construct
DVYRGDFNNL

SEQ ID NO: 150163 - protein, 10 aa, synthetic construct
DWARGDFNNL

SEQ ID NO: 150164 - protein, 10 aa, synthetic construct
DWDRGDFNNL

SEQ ID NO: 150165 - protein, 10 aa, synthetic construct
DWERGDFNNL

SEQ ID NO: 150166 - protein, 10 aa, synthetic construct
DWNRGDFNNL

SEQ ID NO: 150167 - protein, 10 aa, synthetic construct
DWQRGDFNNL

SEQ ID NO: 150168 - protein, 10 aa, synthetic construct
DWSRGDFNNL

SEQ ID NO: 150169 - protein, 10 aa, synthetic construct
DWTRGDFNNL

SEQ ID NO: 150170 - protein, 10 aa, synthetic construct
DWFRGDFNNL

SEQ ID NO: 150171 - protein, 10 aa, synthetic construct
DWGRGDFNNL

SEQ ID NO: 150172 - protein, 10 aa, synthetic construct
DWHRGDFNNL

SEQ ID NO: 150173 - protein, 10 aa, synthetic construct
DWIRGDFNNL

SEQ ID NO: 150174 - protein, 10 aa, synthetic construct
DWKRGDFNNL

SEQ ID NO: 150175 - protein, 10 aa, synthetic construct
DWLRGDFNNL

SEQ ID NO: 150176 - protein, 10 aa, synthetic construct
DWMRGDFNNL

SEQ ID NO: 150177 - protein, 10 aa, synthetic construct
DWPRGDFNNL

SEQ ID NO: 150178 - protein, 10 aa, synthetic construct
DWRRGDFNNL

SEQ ID NO: 150179 - protein, 10 aa, synthetic construct
DWVRGDFNNL

SEQ ID NO: 150180 - protein, 10 aa, synthetic construct
DWWRGDFNNL

SEQ ID NO: 150181 - protein, 10 aa, synthetic construct
DWYRGDFNNL

SEQ ID NO: 150182 - protein, 10 aa, synthetic construct
DYARGDFNNL

SEQ ID NO: 150183 - protein, 10 aa, synthetic construct
DYDRGDFNNL

SEQ ID NO: 150184 - protein, 10 aa, synthetic construct
DYERGDFNNL

SEQ ID NO: 150185 - protein, 10 aa, synthetic construct
DYNRGDFNNL

SEQ ID NO: 150186 - protein, 10 aa, synthetic construct
DYQRGDFNNL

SEQ ID NO: 150187 - protein, 10 aa, synthetic construct
DYSRGDFNNL

SEQ ID NO: 150188 - protein, 10 aa, synthetic construct
DYTRGDFNNL

SEQ ID NO: 150189 - protein, 10 aa, synthetic construct
DYFRGDFNNL

SEQ ID NO: 150190 - protein, 10 aa, synthetic construct
DYGRGDFNNL

SEQ ID NO: 150191 - protein, 10 aa, synthetic construct
DYHRGDFNNL

SEQ ID NO: 150192 - protein, 10 aa, synthetic construct
DYIRGDFNNL

SEQ ID NO: 150193 - protein, 10 aa, synthetic construct
DYKRGDFNNL

SEQ ID NO: 150194 - protein, 10 aa, synthetic construct
DYLRGDFNNL

SEQ ID NO: 150195 - protein, 10 aa, synthetic construct
DYMRGDFNNL

SEQ ID NO: 150196 - protein, 10 aa, synthetic construct
DYPRGDFNNL

SEQ ID NO: 150197 - protein, 10 aa, synthetic construct
DYRRGDFNNL

SEQ ID NO: 150198 - protein, 10 aa, synthetic construct
DYVRGDFNNL

SEQ ID NO: 150199 - protein, 10 aa, synthetic construct
DYWRGDFNNL

SEQ ID NO: 150200 - protein, 10 aa, synthetic construct
DYYRGDFNNL

SEQ ID NO: 150201 - protein, 10 aa, synthetic construct
EAARGDFNNL

SEQ ID NO: 150202 - protein, 10 aa, synthetic construct
EADRGDFNNL

SEQ ID NO: 150203 - protein, 10 aa, synthetic construct
EAERGDFNNL

SEQ ID NO: 150204 - protein, 10 aa, synthetic construct
EANRGDFNNL

SEQ ID NO: 150205 - protein, 10 aa, synthetic construct
EAQRGDFNNL

SEQ ID NO: 150206 - protein, 10 aa, synthetic construct
EASRGDFNNL

SEQ ID NO: 150207 - protein, 10 aa, synthetic construct
EATRGDFNNL

SEQ ID NO: 150208 - protein, 10 aa, synthetic construct
EAFRGDFNNL

SEQ ID NO: 150209 - protein, 10 aa, synthetic construct
EAGRGDFNNL

SEQ ID NO: 150210 - protein, 10 aa, synthetic construct
EAHRGDFNNL

SEQ ID NO: 150211 - protein, 10 aa, synthetic construct
EAIRGDFNNL

SEQ ID NO: 150212 - protein, 10 aa, synthetic construct
EAKRGDFNNL

SEQ ID NO: 150213 - protein, 10 aa, synthetic construct
EALRGDFNNL

SEQ ID NO: 150214 - protein, 10 aa, synthetic construct
EAMRGDFNNL

SEQ ID NO: 150215 - protein, 10 aa, synthetic construct
EAPRGDFNNL

SEQ ID NO: 150216 - protein, 10 aa, synthetic construct
EARRGDFNNL

SEQ ID NO: 150217 - protein, 10 aa, synthetic construct
EAVRGDFNNL

SEQ ID NO: 150218 - protein, 10 aa, synthetic construct
EAWRGDFNNL

SEQ ID NO: 150219 - protein, 10 aa, synthetic construct
EAYRGDFNNL

SEQ ID NO: 150220 - protein, 10 aa, synthetic construct
EDARGDFNNL

SEQ ID NO: 150221 - protein, 10 aa, synthetic construct
EDDRGDFNNL

SEQ ID NO: 150222 - protein, 10 aa, synthetic construct
EDERGDFNNL

SEQ ID NO: 150223 - protein, 10 aa, synthetic construct
EDNRGDFNNL

SEQ ID NO: 150224 - protein, 10 aa, synthetic construct
EDQRGDFNNL

SEQ ID NO: 150225 - protein, 10 aa, synthetic construct
EDSRGDFNNL

SEQ ID NO: 150226 - protein, 10 aa, synthetic construct
EDTRGDFNNL

SEQ ID NO: 150227 - protein, 10 aa, synthetic construct
EDFRGDFNNL

SEQ ID NO: 150228 - protein, 10 aa, synthetic construct
EDGRGDFNNL

SEQ ID NO: 150229 - protein, 10 aa, synthetic construct
EDHRGDFNNL

SEQ ID NO: 150230 - protein, 10 aa, synthetic construct
EDIRGDFNNL

SEQ ID NO: 150231 - protein, 10 aa, synthetic construct
EDKRGDFNNL

SEQ ID NO: 150232 - protein, 10 aa, synthetic construct
EDLRGDFNNL

SEQ ID NO: 150233 - protein, 10 aa, synthetic construct
EDMRGDFNNL

SEQ ID NO: 150234 - protein, 10 aa, synthetic construct
EDPRGDFNNL

SEQ ID NO: 150235 - protein, 10 aa, synthetic construct
EDRRGDFNNL

SEQ ID NO: 150236 - protein, 10 aa, synthetic construct
EDVRGDFNNL

SEQ ID NO: 150237 - protein, 10 aa, synthetic construct
EDWRGDFNNL

SEQ ID NO: 150238 - protein, 10 aa, synthetic construct
EDYRGDFNNL

SEQ ID NO: 150239 - protein, 10 aa, synthetic construct
EEARGDFNNL

SEQ ID NO: 150240 - protein, 10 aa, synthetic construct
EEDRGDFNNL

SEQ ID NO: 150241 - protein, 10 aa, synthetic construct
EEERGDFNNL

SEQ ID NO: 150242 - protein, 10 aa, synthetic construct
EENRGDFNNL

SEQ ID NO: 150243 - protein, 10 aa, synthetic construct
EEQRGDFNNL

SEQ ID NO: 150244 - protein, 10 aa, synthetic construct
EESRGDFNNL

SEQ ID NO: 150245 - protein, 10 aa, synthetic construct
EETRGDFNNL

SEQ ID NO: 150246 - protein, 10 aa, synthetic construct
EEFRGDFNNL

SEQ ID NO: 150247 - protein, 10 aa, synthetic construct
EEGRGDFNNL

SEQ ID NO: 150248 - protein, 10 aa, synthetic construct
EEHRGDFNNL

SEQ ID NO: 150249 - protein, 10 aa, synthetic construct
EEIRGDFNNL

SEQ ID NO: 150250 - protein, 10 aa, synthetic construct
EEKRGDFNNL

SEQ ID NO: 150251 - protein, 10 aa, synthetic construct
EELRGDFNNL

SEQ ID NO: 150252 - protein, 10 aa, synthetic construct
EEMRGDFNNL

SEQ ID NO: 150253 - protein, 10 aa, synthetic construct
EEPRGDFNNL

SEQ ID NO: 150254 - protein, 10 aa, synthetic construct
EERRGDFNNL

SEQ ID NO: 150255 - protein, 10 aa, synthetic construct
EEVRGDFNNL

SEQ ID NO: 150256 - protein, 10 aa, synthetic construct
EEWRGDFNNL

SEQ ID NO: 150257 - protein, 10 aa, synthetic construct
EEYRGDFNNL

SEQ ID NO: 150258 - protein, 10 aa, synthetic construct
ENARGDFNNL

SEQ ID NO: 150259 - protein, 10 aa, synthetic construct
ENDRGDFNNL

SEQ ID NO: 150260 - protein, 10 aa, synthetic construct
ENERGDFNNL

SEQ ID NO: 150261 - protein, 10 aa, synthetic construct
ENNRGDFNNL

SEQ ID NO: 150262 - protein, 10 aa, synthetic construct
ENQRGDFNNL

SEQ ID NO: 150263 - protein, 10 aa, synthetic construct
ENSRGDFNNL

SEQ ID NO: 150264 - protein, 10 aa, synthetic construct
ENTRGDFNNL

SEQ ID NO: 150265 - protein, 10 aa, synthetic construct
ENFRGDFNNL

SEQ ID NO: 150266 - protein, 10 aa, synthetic construct
ENGRGDFNNL

SEQ ID NO: 150267 - protein, 10 aa, synthetic construct
ENHRGDFNNL

SEQ ID NO: 150268 - protein, 10 aa, synthetic construct
ENIRGDFNNL

SEQ ID NO: 150269 - protein, 10 aa, synthetic construct
ENKRGDFNNL

SEQ ID NO: 150270 - protein, 10 aa, synthetic construct
ENLRGDFNNL

SEQ ID NO: 150271 - protein, 10 aa, synthetic construct
ENMRGDFNNL

SEQ ID NO: 150272 - protein, 10 aa, synthetic construct
ENPRGDFNNL

SEQ ID NO: 150273 - protein, 10 aa, synthetic construct
ENVRGDFNNL

SEQ ID NO: 150274 - protein, 10 aa, synthetic construct
ENWRGDFNNL

SEQ ID NO: 150275 - protein, 10 aa, synthetic construct
ENYRGDFNNL

SEQ ID NO: 150276 - protein, 10 aa, synthetic construct
EQARGDFNNL

SEQ ID NO: 150277 - protein, 10 aa, synthetic construct
EQDRGDFNNL

SEQ ID NO: 150278 - protein, 10 aa, synthetic construct
EQERGDFNNL

SEQ ID NO: 150279 - protein, 10 aa, synthetic construct
EQNRGDFNNL

SEQ ID NO: 150280 - protein, 10 aa, synthetic construct
EQQRGDFNNL

SEQ ID NO: 150281 - protein, 10 aa, synthetic construct
EQSRGDFNNL

SEQ ID NO: 150282 - protein, 10 aa, synthetic construct
EQTRGDFNNL

SEQ ID NO: 150283 - protein, 10 aa, synthetic construct
EQFRGDFNNL

SEQ ID NO: 150284 - protein, 10 aa, synthetic construct
EQGRGDFNNL

SEQ ID NO: 150285 - protein, 10 aa, synthetic construct
EQHRGDFNNL

SEQ ID NO: 150286 - protein, 10 aa, synthetic construct
EQIRGDFNNL

SEQ ID NO: 150287 - protein, 10 aa, synthetic construct
EQKRGDFNNL

SEQ ID NO: 150288 - protein, 10 aa, synthetic construct
EQLRGDFNNL

SEQ ID NO: 150289 - protein, 10 aa, synthetic construct
EQMRGDFNNL

SEQ ID NO: 150290 - protein, 10 aa, synthetic construct
EQPRGDFNNL

SEQ ID NO: 150291 - protein, 10 aa, synthetic construct
EQRRGDFNNL

SEQ ID NO: 150292 - protein, 10 aa, synthetic construct
EQVRGDFNNL

SEQ ID NO: 150293 - protein, 10 aa, synthetic construct
EQWRGDFNNL

SEQ ID NO: 150294 - protein, 10 aa, synthetic construct
EQYRGDFNNL

SEQ ID NO: 150295 - protein, 10 aa, synthetic construct
ESARGDFNNL

SEQ ID NO: 150296 - protein, 10 aa, synthetic construct
ESDRGDFNNL

SEQ ID NO: 150297 - protein, 10 aa, synthetic construct
ESERGDFNNL

SEQ ID NO: 150298 - protein, 10 aa, synthetic construct
ESNRGDFNNL

SEQ ID NO: 150299 - protein, 10 aa, synthetic construct
ESQRGDFNNL

SEQ ID NO: 150300 - protein, 10 aa, synthetic construct
ESSRGDFNNL

SEQ ID NO: 150301 - protein, 10 aa, synthetic construct
ESTRGDFNNL

SEQ ID NO: 150302 - protein, 10 aa, synthetic construct
ESFRGDFNNL

SEQ ID NO: 150303 - protein, 10 aa, synthetic construct
ESGRGDFNNL

SEQ ID NO: 150304 - protein, 10 aa, synthetic construct
ESHRGDFNNL

SEQ ID NO: 150305 - protein, 10 aa, synthetic construct
ESIRGDFNNL

SEQ ID NO: 150306 - protein, 10 aa, synthetic construct
ESKRGDFNNL

SEQ ID NO: 150307 - protein, 10 aa, synthetic construct
ESLRGDFNNL

SEQ ID NO: 150308 - protein, 10 aa, synthetic construct
ESMRGDFNNL

SEQ ID NO: 150309 - protein, 10 aa, synthetic construct
ESPRGDFNNL

SEQ ID NO: 150310 - protein, 10 aa, synthetic construct
ESRRGDFNNL

SEQ ID NO: 150311 - protein, 10 aa, synthetic construct
ESVRGDFNNL

SEQ ID NO: 150312 - protein, 10 aa, synthetic construct
ESWRGDFNNL

SEQ ID NO: 150313 - protein, 10 aa, synthetic construct
ESYRGDFNNL

SEQ ID NO: 150314 - protein, 10 aa, synthetic construct
ETARGDFNNL

SEQ ID NO: 150315 - protein, 10 aa, synthetic construct
ETDRGDFNNL

SEQ ID NO: 150316 - protein, 10 aa, synthetic construct
ETERGDFNNL

SEQ ID NO: 150317 - protein, 10 aa, synthetic construct
ETNRGDFNNL

SEQ ID NO: 150318 - protein, 10 aa, synthetic construct
ETQRGDFNNL

SEQ ID NO: 150319 - protein, 10 aa, synthetic construct
ETSRGDFNNL

SEQ ID NO: 150320 - protein, 10 aa, synthetic construct
ETTRGDFNNL

SEQ ID NO: 150321 - protein, 10 aa, synthetic construct
ETFRGDFNNL

SEQ ID NO: 150322 - protein, 10 aa, synthetic construct
ETGRGDFNNL

SEQ ID NO: 150323 - protein, 10 aa, synthetic construct
ETHRGDFNNL

SEQ ID NO: 150324 - protein, 10 aa, synthetic construct
ETIRGDFNNL

SEQ ID NO: 150325 - protein, 10 aa, synthetic construct
ETKRGDFNNL

SEQ ID NO: 150326 - protein, 10 aa, synthetic construct
ETLRGDFNNL

SEQ ID NO: 150327 - protein, 10 aa, synthetic construct
ETMRGDFNNL

SEQ ID NO: 150328 - protein, 10 aa, synthetic construct
ETPRGDFNNL

SEQ ID NO: 150329 - protein, 10 aa, synthetic construct
ETRRGDFNNL

SEQ ID NO: 150330 - protein, 10 aa, synthetic construct
ETVRGDFNNL

SEQ ID NO: 150331 - protein, 10 aa, synthetic construct
ETWRGDFNNL

SEQ ID NO: 150332 - protein, 10 aa, synthetic construct
ETYRGDFNNL

SEQ ID NO: 150333 - protein, 10 aa, synthetic construct
EFARGDFNNL

SEQ ID NO: 150334 - protein, 10 aa, synthetic construct
EFDRGDFNNL

SEQ ID NO: 150335 - protein, 10 aa, synthetic construct
EFERGDFNNL

SEQ ID NO: 150336 - protein, 10 aa, synthetic construct
EFNRGDFNNL

SEQ ID NO: 150337 - protein, 10 aa, synthetic construct
EFQRGDFNNL

SEQ ID NO: 150338 - protein, 10 aa, synthetic construct
EFSRGDFNNL

SEQ ID NO: 150339 - protein, 10 aa, synthetic construct
EFTRGDFNNL

SEQ ID NO: 150340 - protein, 10 aa, synthetic construct
EFFRGDFNNL

SEQ ID NO: 150341 - protein, 10 aa, synthetic construct
EFGRGDFNNL

SEQ ID NO: 150342 - protein, 10 aa, synthetic construct
EFHRGDFNNL

SEQ ID NO: 150343 - protein, 10 aa, synthetic construct
EFIRGDFNNL

SEQ ID NO: 150344 - protein, 10 aa, synthetic construct
EFKRGDFNNL

SEQ ID NO: 150345 - protein, 10 aa, synthetic construct
EFLRGDFNNL

SEQ ID NO: 150346 - protein, 10 aa, synthetic construct
EFMRGDFNNL

SEQ ID NO: 150347 - protein, 10 aa, synthetic construct
EFPRGDFNNL

SEQ ID NO: 150348 - protein, 10 aa, synthetic construct
EFRRGDFNNL

SEQ ID NO: 150349 - protein, 10 aa, synthetic construct
EFVRGDFNNL

SEQ ID NO: 150350 - protein, 10 aa, synthetic construct
EFWRGDFNNL

SEQ ID NO: 150351 - protein, 10 aa, synthetic construct
EFYRGDFNNL

SEQ ID NO: 150352 - protein, 10 aa, synthetic construct
EGARGDFNNL

SEQ ID NO: 150353 - protein, 10 aa, synthetic construct
EGDRGDFNNL

SEQ ID NO: 150354 - protein, 10 aa, synthetic construct
EGERGDFNNL

SEQ ID NO: 150355 - protein, 10 aa, synthetic construct
EGNRGDFNNL

SEQ ID NO: 150356 - protein, 10 aa, synthetic construct
EGQRGDFNNL

SEQ ID NO: 150357 - protein, 10 aa, synthetic construct
EGSRGDFNNL

SEQ ID NO: 150358 - protein, 10 aa, synthetic construct
EGTRGDFNNL

SEQ ID NO: 150359 - protein, 10 aa, synthetic construct
EGFRGDFNNL

SEQ ID NO: 150360 - protein, 10 aa, synthetic construct
EGGRGDFNNL

SEQ ID NO: 150361 - protein, 10 aa, synthetic construct
EGHRGDFNNL

SEQ ID NO: 150362 - protein, 10 aa, synthetic construct
EGIRGDFNNL

SEQ ID NO: 150363 - protein, 10 aa, synthetic construct
EGKRGDFNNL

SEQ ID NO: 150364 - protein, 10 aa, synthetic construct
EGLRGDFNNL

SEQ ID NO: 150365 - protein, 10 aa, synthetic construct
EGMRGDFNNL

SEQ ID NO: 150366 - protein, 10 aa, synthetic construct
EGPRGDFNNL

SEQ ID NO: 150367 - protein, 10 aa, synthetic construct
EGRRGDFNNL

SEQ ID NO: 150368 - protein, 10 aa, synthetic construct
EGVRGDFNNL

SEQ ID NO: 150369 - protein, 10 aa, synthetic construct
EGWRGDFNNL

SEQ ID NO: 150370 - protein, 10 aa, synthetic construct
EGYRGDFNNL

SEQ ID NO: 150371 - protein, 10 aa, synthetic construct
EHARGDFNNL

SEQ ID NO: 150372 - protein, 10 aa, synthetic construct
EHDRGDFNNL

SEQ ID NO: 150373 - protein, 10 aa, synthetic construct
EHERGDFNNL

SEQ ID NO: 150374 - protein, 10 aa, synthetic construct
EHNRGDFNNL

SEQ ID NO: 150375 - protein, 10 aa, synthetic construct
EHQRGDFNNL

SEQ ID NO: 150376 - protein, 10 aa, synthetic construct
EHSRGDFNNL

SEQ ID NO: 150377 - protein, 10 aa, synthetic construct
EHTRGDFNNL

SEQ ID NO: 150378 - protein, 10 aa, synthetic construct
EHFRGDFNNL

SEQ ID NO: 150379 - protein, 10 aa, synthetic construct
EHGRGDFNNL

SEQ ID NO: 150380 - protein, 10 aa, synthetic construct
EHHRGDFNNL

SEQ ID NO: 150381 - protein, 10 aa, synthetic construct
EHIRGDFNNL

SEQ ID NO: 150382 - protein, 10 aa, synthetic construct
EHKRGDFNNL

SEQ ID NO: 150383 - protein, 10 aa, synthetic construct
EHLRGDFNNL

SEQ ID NO: 150384 - protein, 10 aa, synthetic construct
EHMRGDFNNL

SEQ ID NO: 150385 - protein, 10 aa, synthetic construct
EHPRGDFNNL

SEQ ID NO: 150386 - protein, 10 aa, synthetic construct
EHRRGDFNNL

SEQ ID NO: 150387 - protein, 10 aa, synthetic construct
EHVRGDFNNL

SEQ ID NO: 150388 - protein, 10 aa, synthetic construct
EHWRGDFNNL

SEQ ID NO: 150389 - protein, 10 aa, synthetic construct
EHYRGDFNNL

SEQ ID NO: 150390 - protein, 10 aa, synthetic construct
EIARGDFNNL

SEQ ID NO: 150391 - protein, 10 aa, synthetic construct
EIDRGDFNNL

SEQ ID NO: 150392 - protein, 10 aa, synthetic construct
EIERGDFNNL

SEQ ID NO: 150393 - protein, 10 aa, synthetic construct
EINRGDFNNL

SEQ ID NO: 150394 - protein, 10 aa, synthetic construct
EIQRGDFNNL

SEQ ID NO: 150395 - protein, 10 aa, synthetic construct
EISRGDFNNL

SEQ ID NO: 150396 - protein, 10 aa, synthetic construct
EITRGDFNNL

SEQ ID NO: 150397 - protein, 10 aa, synthetic construct
EIFRGDFNNL

SEQ ID NO: 150398 - protein, 10 aa, synthetic construct
EIGRGDFNNL

SEQ ID NO: 150399 - protein, 10 aa, synthetic construct
EIHRGDFNNL

SEQ ID NO: 150400 - protein, 10 aa, synthetic construct
EIIRGDFNNL

SEQ ID NO: 150401 - protein, 10 aa, synthetic construct
EIKRGDFNNL

SEQ ID NO: 150402 - protein, 10 aa, synthetic construct
EILRGDFNNL

SEQ ID NO: 150403 - protein, 10 aa, synthetic construct
EIMRGDFNNL

SEQ ID NO: 150404 - protein, 10 aa, synthetic construct
EIPRGDFNNL

SEQ ID NO: 150405 - protein, 10 aa, synthetic construct
EIRRGDFNNL

SEQ ID NO: 150406 - protein, 10 aa, synthetic construct
EIVRGDFNNL

SEQ ID NO: 150407 - protein, 10 aa, synthetic construct
EIWRGDFNNL

SEQ ID NO: 150408 - protein, 10 aa, synthetic construct
EIYRGDFNNL

SEQ ID NO: 150409 - protein, 10 aa, synthetic construct
EKARGDFNNL

SEQ ID NO: 150410 - protein, 10 aa, synthetic construct
EKDRGDFNNL

SEQ ID NO: 150411 - protein, 10 aa, synthetic construct
EKERGDFNNL

SEQ ID NO: 150412 - protein, 10 aa, synthetic construct
EKNRGDFNNL

SEQ ID NO: 150413 - protein, 10 aa, synthetic construct
EKQRGDFNNL

SEQ ID NO: 150414 - protein, 10 aa, synthetic construct
EKSRGDFNNL

SEQ ID NO: 150415 - protein, 10 aa, synthetic construct
EKTRGDFNNL

SEQ ID NO: 150416 - protein, 10 aa, synthetic construct
EKFRGDFNNL

SEQ ID NO: 150417 - protein, 10 aa, synthetic construct
EKGRGDFNNL

SEQ ID NO: 150418 - protein, 10 aa, synthetic construct
EKHRGDFNNL

SEQ ID NO: 150419 - protein, 10 aa, synthetic construct
EKIRGDFNNL

SEQ ID NO: 150420 - protein, 10 aa, synthetic construct
EKKRGDFNNL

SEQ ID NO: 150421 - protein, 10 aa, synthetic construct
EKLRGDFNNL

SEQ ID NO: 150422 - protein, 10 aa, synthetic construct
EKMRGDFNNL

SEQ ID NO: 150423 - protein, 10 aa, synthetic construct
EKPRGDFNNL

SEQ ID NO: 150424 - protein, 10 aa, synthetic construct
EKRRGDFNNL

SEQ ID NO: 150425 - protein, 10 aa, synthetic construct
EKVRGDFNNL

SEQ ID NO: 150426 - protein, 10 aa, synthetic construct
EKWRGDFNNL

SEQ ID NO: 150427 - protein, 10 aa, synthetic construct
EKYRGDFNNL

SEQ ID NO: 150428 - protein, 10 aa, synthetic construct
ELARGDFNNL

SEQ ID NO: 150429 - protein, 10 aa, synthetic construct
ELDRGDFNNL

SEQ ID NO: 150430 - protein, 10 aa, synthetic construct
ELERGDFNNL

SEQ ID NO: 150431 - protein, 10 aa, synthetic construct
ELNRGDFNNL

SEQ ID NO: 150432 - protein, 10 aa, synthetic construct
ELQRGDFNNL

SEQ ID NO: 150433 - protein, 10 aa, synthetic construct
ELSRGDFNNL

SEQ ID NO: 150434 - protein, 10 aa, synthetic construct
ELTRGDFNNL

SEQ ID NO: 150435 - protein, 10 aa, synthetic construct
ELFRGDFNNL

SEQ ID NO: 150436 - protein, 10 aa, synthetic construct
ELGRGDFNNL

SEQ ID NO: 150437 - protein, 10 aa, synthetic construct
ELHRGDFNNL

SEQ ID NO: 150438 - protein, 10 aa, synthetic construct
ELIRGDFNNL

SEQ ID NO: 150439 - protein, 10 aa, synthetic construct
ELKRGDFNNL

SEQ ID NO: 150440 - protein, 10 aa, synthetic construct
ELLRGDFNNL

SEQ ID NO: 150441 - protein, 10 aa, synthetic construct
ELMRGDFNNL

SEQ ID NO: 150442 - protein, 10 aa, synthetic construct
ELPRGDFNNL

SEQ ID NO: 150443 - protein, 10 aa, synthetic construct
ELRRGDFNNL

SEQ ID NO: 150444 - protein, 10 aa, synthetic construct
ELVRGDFNNL

SEQ ID NO: 150445 - protein, 10 aa, synthetic construct
ELWRGDFNNL

SEQ ID NO: 150446 - protein, 10 aa, synthetic construct
ELYRGDFNNL

SEQ ID NO: 150447 - protein, 10 aa, synthetic construct
EMARGDFNNL

SEQ ID NO: 150448 - protein, 10 aa, synthetic construct
EMDRGDFNNL

SEQ ID NO: 150449 - protein, 10 aa, synthetic construct
EMERGDFNNL

SEQ ID NO: 150450 - protein, 10 aa, synthetic construct
EMNRGDFNNL

SEQ ID NO: 150451 - protein, 10 aa, synthetic construct
EMQRGDFNNL

SEQ ID NO: 150452 - protein, 10 aa, synthetic construct
EMSRGDFNNL

SEQ ID NO: 150453 - protein, 10 aa, synthetic construct
EMTRGDFNNL

SEQ ID NO: 150454 - protein, 10 aa, synthetic construct
EMFRGDFNNL

SEQ ID NO: 150455 - protein, 10 aa, synthetic construct
EMGRGDFNNL

SEQ ID NO: 150456 - protein, 10 aa, synthetic construct
EMHRGDFNNL

SEQ ID NO: 150457 - protein, 10 aa, synthetic construct
EMIRGDFNNL

SEQ ID NO: 150458 - protein, 10 aa, synthetic construct
EMKRGDFNNL

SEQ ID NO: 150459 - protein, 10 aa, synthetic construct
EMLRGDFNNL

SEQ ID NO: 150460 - protein, 10 aa, synthetic construct
EMMRGDFNNL

SEQ ID NO: 150461 - protein, 10 aa, synthetic construct
EMPRGDFNNL

SEQ ID NO: 150462 - protein, 10 aa, synthetic construct
EMRRGDFNNL

SEQ ID NO: 150463 - protein, 10 aa, synthetic construct
EMVRGDFNNL

SEQ ID NO: 150464 - protein, 10 aa, synthetic construct
EMWRGDFNNL

SEQ ID NO: 150465 - protein, 10 aa, synthetic construct
EMYRGDFNNL

SEQ ID NO: 150466 - protein, 10 aa, synthetic construct
EPARGDFNNL

SEQ ID NO: 150467 - protein, 10 aa, synthetic construct
EPDRGDFNNL

SEQ ID NO: 150468 - protein, 10 aa, synthetic construct
EPERGDFNNL

SEQ ID NO: 150469 - protein, 10 aa, synthetic construct
EPNRGDFNNL

SEQ ID NO: 150470 - protein, 10 aa, synthetic construct
EPQRGDFNNL

SEQ ID NO: 150471 - protein, 10 aa, synthetic construct
EPSRGDFNNL

SEQ ID NO: 150472 - protein, 10 aa, synthetic construct
EPTRGDFNNL

SEQ ID NO: 150473 - protein, 10 aa, synthetic construct
EPFRGDFNNL

SEQ ID NO: 150474 - protein, 10 aa, synthetic construct
EPGRGDFNNL

SEQ ID NO: 150475 - protein, 10 aa, synthetic construct
EPHRGDFNNL

SEQ ID NO: 150476 - protein, 10 aa, synthetic construct
EPIRGDFNNL

SEQ ID NO: 150477 - protein, 10 aa, synthetic construct
EPKRGDFNNL

SEQ ID NO: 150478 - protein, 10 aa, synthetic construct
EPLRGDFNNL

SEQ ID NO: 150479 - protein, 10 aa, synthetic construct
EPMRGDFNNL

SEQ ID NO: 150480 - protein, 10 aa, synthetic construct
EPPRGDFNNL

SEQ ID NO: 150481 - protein, 10 aa, synthetic construct
EPRRGDFNNL

SEQ ID NO: 150482 - protein, 10 aa, synthetic construct
EPVRGDFNNL

SEQ ID NO: 150483 - protein, 10 aa, synthetic construct
EPWRGDFNNL

SEQ ID NO: 150484 - protein, 10 aa, synthetic construct
EPYRGDFNNL

SEQ ID NO: 150485 - protein, 10 aa, synthetic construct
ERARGDFNNL

SEQ ID NO: 150486 - protein, 10 aa, synthetic construct
ERDRGDFNNL

SEQ ID NO: 150487 - protein, 10 aa, synthetic construct
ERERGDFNNL

SEQ ID NO: 150488 - protein, 10 aa, synthetic construct
ERNRGDFNNL

SEQ ID NO: 150489 - protein, 10 aa, synthetic construct
ERQRGDFNNL

SEQ ID NO: 150490 - protein, 10 aa, synthetic construct
ERSRGDFNNL

SEQ ID NO: 150491 - protein, 10 aa, synthetic construct
ERTRGDFNNL

SEQ ID NO: 150492 - protein, 10 aa, synthetic construct
ERFRGDFNNL

SEQ ID NO: 150493 - protein, 10 aa, synthetic construct
ERGRGDFNNL

SEQ ID NO: 150494 - protein, 10 aa, synthetic construct
ERHRGDFNNL

SEQ ID NO: 150495 - protein, 10 aa, synthetic construct
ERIRGDFNNL

SEQ ID NO: 150496 - protein, 10 aa, synthetic construct
ERKRGDFNNL

SEQ ID NO: 150497 - protein, 10 aa, synthetic construct
ERLRGDFNNL

SEQ ID NO: 150498 - protein, 10 aa, synthetic construct
ERMRGDFNNL

SEQ ID NO: 150499 - protein, 10 aa, synthetic construct
ERPRGDFNNL

SEQ ID NO: 150500 - protein, 10 aa, synthetic construct
ERRRGDFNNL

SEQ ID NO: 150501 - protein, 10 aa, synthetic construct
ERVRGDFNNL

SEQ ID NO: 150502 - protein, 10 aa, synthetic construct
ERWRGDFNNL

SEQ ID NO: 150503 - protein, 10 aa, synthetic construct
ERYRGDFNNL

SEQ ID NO: 150504 - protein, 10 aa, synthetic construct
EVARGDFNNL

SEQ ID NO: 150505 - protein, 10 aa, synthetic construct
EVDRGDFNNL

SEQ ID NO: 150506 - protein, 10 aa, synthetic construct
EVERGDFNNL

SEQ ID NO: 150507 - protein, 10 aa, synthetic construct
EVNRGDFNNL

SEQ ID NO: 150508 - protein, 10 aa, synthetic construct
EVQRGDFNNL

SEQ ID NO: 150509 - protein, 10 aa, synthetic construct
EVSRGDFNNL

SEQ ID NO: 150510 - protein, 10 aa, synthetic construct
EVTRGDFNNL

SEQ ID NO: 150511 - protein, 10 aa, synthetic construct
EVFRGDFNNL

SEQ ID NO: 150512 - protein, 10 aa, synthetic construct
EVGRGDFNNL

SEQ ID NO: 150513 - protein, 10 aa, synthetic construct
EVHRGDFNNL

SEQ ID NO: 150514 - protein, 10 aa, synthetic construct
EVIRGDFNNL

SEQ ID NO: 150515 - protein, 10 aa, synthetic construct
EVKRGDFNNL

SEQ ID NO: 150516 - protein, 10 aa, synthetic construct
EVLRGDFNNL

SEQ ID NO: 150517 - protein, 10 aa, synthetic construct
EVMRGDFNNL

SEQ ID NO: 150518 - protein, 10 aa, synthetic construct
EVPRGDFNNL

SEQ ID NO: 150519 - protein, 10 aa, synthetic construct
EVRRGDFNNL

SEQ ID NO: 150520 - protein, 10 aa, synthetic construct
EVVRGDFNNL

SEQ ID NO: 150521 - protein, 10 aa, synthetic construct
EVWRGDFNNL

SEQ ID NO: 150522 - protein, 10 aa, synthetic construct
EVYRGDFNNL

SEQ ID NO: 150523 - protein, 10 aa, synthetic construct
EWARGDFNNL

SEQ ID NO: 150524 - protein, 10 aa, synthetic construct
EWDRGDFNNL

SEQ ID NO: 150525 - protein, 10 aa, synthetic construct
EWERGDFNNL

SEQ ID NO: 150526 - protein, 10 aa, synthetic construct
EWNRGDFNNL

SEQ ID NO: 150527 - protein, 10 aa, synthetic construct
EWQRGDFNNL

SEQ ID NO: 150528 - protein, 10 aa, synthetic construct
EWSRGDFNNL

SEQ ID NO: 150529 - protein, 10 aa, synthetic construct
EWTRGDFNNL

SEQ ID NO: 150530 - protein, 10 aa, synthetic construct
EWFRGDFNNL

SEQ ID NO: 150531 - protein, 10 aa, synthetic construct
EWGRGDFNNL

SEQ ID NO: 150532 - protein, 10 aa, synthetic construct
EWHRGDFNNL

SEQ ID NO: 150533 - protein, 10 aa, synthetic construct
EWIRGDFNNL

SEQ ID NO: 150534 - protein, 10 aa, synthetic construct
EWKRGDFNNL

SEQ ID NO: 150535 - protein, 10 aa, synthetic construct
EWLRGDFNNL

SEQ ID NO: 150536 - protein, 10 aa, synthetic construct
EWMRGDFNNL

SEQ ID NO: 150537 - protein, 10 aa, synthetic construct
EWPRGDFNNL

SEQ ID NO: 150538 - protein, 10 aa, synthetic construct
EWRRGDFNNL

SEQ ID NO: 150539 - protein, 10 aa, synthetic construct
EWVRGDFNNL

SEQ ID NO: 150540 - protein, 10 aa, synthetic construct
EWWRGDFNNL

SEQ ID NO: 150541 - protein, 10 aa, synthetic construct
EWYRGDFNNL

SEQ ID NO: 150542 - protein, 10 aa, synthetic construct
EYARGDFNNL

SEQ ID NO: 150543 - protein, 10 aa, synthetic construct
EYDRGDFNNL

SEQ ID NO: 150544 - protein, 10 aa, synthetic construct
EYERGDFNNL

SEQ ID NO: 150545 - protein, 10 aa, synthetic construct
EYNRGDFNNL

SEQ ID NO: 150546 - protein, 10 aa, synthetic construct
EYQRGDFNNL

SEQ ID NO: 150547 - protein, 10 aa, synthetic construct
EYSRGDFNNL

SEQ ID NO: 150548 - protein, 10 aa, synthetic construct
EYTRGDFNNL

SEQ ID NO: 150549 - protein, 10 aa, synthetic construct
EYFRGDFNNL

SEQ ID NO: 150550 - protein, 10 aa, synthetic construct
EYGRGDFNNL

SEQ ID NO: 150551 - protein, 10 aa, synthetic construct
EYHRGDFNNL

SEQ ID NO: 150552 - protein, 10 aa, synthetic construct
EYIRGDFNNL

SEQ ID NO: 150553 - protein, 10 aa, synthetic construct
EYKRGDFNNL

SEQ ID NO: 150554 - protein, 10 aa, synthetic construct
EYLRGDFNNL

SEQ ID NO: 150555 - protein, 10 aa, synthetic construct
EYMRGDFNNL

SEQ ID NO: 150556 - protein, 10 aa, synthetic construct
EYPRGDFNNL

SEQ ID NO: 150557 - protein, 10 aa, synthetic construct
EYRRGDFNNL

SEQ ID NO: 150558 - protein, 10 aa, synthetic construct
EYVRGDFNNL

SEQ ID NO: 150559 - protein, 10 aa, synthetic construct
EYWRGDFNNL

SEQ ID NO: 150560 - protein, 10 aa, synthetic construct
EYYRGDFNNL

SEQ ID NO: 150561 - protein, 10 aa, synthetic construct
NAARGDFNNL

SEQ ID NO: 150562 - protein, 10 aa, synthetic construct
NADRGDFNNL

SEQ ID NO: 150563 - protein, 10 aa, synthetic construct
NAERGDFNNL

SEQ ID NO: 150564 - protein, 10 aa, synthetic construct
NANRGDFNNL

SEQ ID NO: 150565 - protein, 10 aa, synthetic construct
NAQRGDFNNL

SEQ ID NO: 150566 - protein, 10 aa, synthetic construct
NASRGDFNNL

SEQ ID NO: 150567 - protein, 10 aa, synthetic construct
NATRGDFNNL

SEQ ID NO: 150568 - protein, 10 aa, synthetic construct
NAFRGDFNNL

SEQ ID NO: 150569 - protein, 10 aa, synthetic construct
NAGRGDFNNL

SEQ ID NO: 150570 - protein, 10 aa, synthetic construct
NAHRGDFNNL

SEQ ID NO: 150571 - protein, 10 aa, synthetic construct
NAIRGDFNNL

SEQ ID NO: 150572 - protein, 10 aa, synthetic construct
NAKRGDFNNL

SEQ ID NO: 150573 - protein, 10 aa, synthetic construct
NALRGDFNNL

SEQ ID NO: 150574 - protein, 10 aa, synthetic construct
NAMRGDFNNL

SEQ ID NO: 150575 - protein, 10 aa, synthetic construct
NAPRGDFNNL

SEQ ID NO: 150576 - protein, 10 aa, synthetic construct
NARRGDFNNL

SEQ ID NO: 150577 - protein, 10 aa, synthetic construct
NAVRGDFNNL

SEQ ID NO: 150578 - protein, 10 aa, synthetic construct
NAWRGDFNNL

SEQ ID NO: 150579 - protein, 10 aa, synthetic construct
NAYRGDFNNL

SEQ ID NO: 150580 - protein, 10 aa, synthetic construct
NDARGDFNNL

SEQ ID NO: 150581 - protein, 10 aa, synthetic construct
NDDRGDFNNL

SEQ ID NO: 150582 - protein, 10 aa, synthetic construct
NDERGDFNNL

SEQ ID NO: 150583 - protein, 10 aa, synthetic construct
NDNRGDFNNL

SEQ ID NO: 150584 - protein, 10 aa, synthetic construct
NDQRGDFNNL

SEQ ID NO: 150585 - protein, 10 aa, synthetic construct
NDSRGDFNNL

SEQ ID NO: 150586 - protein, 10 aa, synthetic construct
NDTRGDFNNL

SEQ ID NO: 150587 - protein, 10 aa, synthetic construct
NDFRGDFNNL

SEQ ID NO: 150588 - protein, 10 aa, synthetic construct
NDGRGDFNNL

SEQ ID NO: 150589 - protein, 10 aa, synthetic construct
NDHRGDFNNL

SEQ ID NO: 150590 - protein, 10 aa, synthetic construct
NDIRGDFNNL

SEQ ID NO: 150591 - protein, 10 aa, synthetic construct
NDKRGDFNNL

SEQ ID NO: 150592 - protein, 10 aa, synthetic construct
NDLRGDFNNL

SEQ ID NO: 150593 - protein, 10 aa, synthetic construct
NDMRGDFNNL

SEQ ID NO: 150594 - protein, 10 aa, synthetic construct
NDPRGDFNNL

SEQ ID NO: 150595 - protein, 10 aa, synthetic construct
NDRRGDFNNL

SEQ ID NO: 150596 - protein, 10 aa, synthetic construct
NDVRGDFNNL

SEQ ID NO: 150597 - protein, 10 aa, synthetic construct
NDWRGDFNNL

SEQ ID NO: 150598 - protein, 10 aa, synthetic construct
NDYRGDFNNL

SEQ ID NO: 150599 - protein, 10 aa, synthetic construct
NEARGDFNNL

SEQ ID NO: 150600 - protein, 10 aa, synthetic construct
NEDRGDFNNL

SEQ ID NO: 150601 - protein, 10 aa, synthetic construct
NEERGDFNNL

SEQ ID NO: 150602 - protein, 10 aa, synthetic construct
NENRGDFNNL

SEQ ID NO: 150603 - protein, 10 aa, synthetic construct
NEQRGDFNNL

SEQ ID NO: 150604 - protein, 10 aa, synthetic construct
NESRGDFNNL

SEQ ID NO: 150605 - protein, 10 aa, synthetic construct
NETRGDFNNL

SEQ ID NO: 150606 - protein, 10 aa, synthetic construct
NEFRGDFNNL

SEQ ID NO: 150607 - protein, 10 aa, synthetic construct
NEGRGDFNNL

SEQ ID NO: 150608 - protein, 10 aa, synthetic construct
NEHRGDFNNL

SEQ ID NO: 150609 - protein, 10 aa, synthetic construct
NEIRGDFNNL

SEQ ID NO: 150610 - protein, 10 aa, synthetic construct
NEKRGDFNNL

SEQ ID NO: 150611 - protein, 10 aa, synthetic construct
NELRGDFNNL

SEQ ID NO: 150612 - protein, 10 aa, synthetic construct
NEMRGDFNNL

SEQ ID NO: 150613 - protein, 10 aa, synthetic construct
NEPRGDFNNL

SEQ ID NO: 150614 - protein, 10 aa, synthetic construct
NERRGDFNNL

SEQ ID NO: 150615 - protein, 10 aa, synthetic construct
NEVRGDFNNL

SEQ ID NO: 150616 - protein, 10 aa, synthetic construct
NEWRGDFNNL

SEQ ID NO: 150617 - protein, 10 aa, synthetic construct
NEYRGDFNNL

SEQ ID NO: 150618 - protein, 10 aa, synthetic construct
NNARGDFNNL

SEQ ID NO: 150619 - protein, 10 aa, synthetic construct
NNDRGDFNNL

SEQ ID NO: 150620 - protein, 10 aa, synthetic construct
NNERGDFNNL

SEQ ID NO: 150621 - protein, 10 aa, synthetic construct
NNNRGDFNNL

SEQ ID NO: 150622 - protein, 10 aa, synthetic construct
NNQRGDFNNL

SEQ ID NO: 150623 - protein, 10 aa, synthetic construct
NNSRGDFNNL

SEQ ID NO: 150624 - protein, 10 aa, synthetic construct
NNTRGDFNNL

SEQ ID NO: 150625 - protein, 10 aa, synthetic construct
NNFRGDFNNL

SEQ ID NO: 150626 - protein, 10 aa, synthetic construct
NNGRGDFNNL

SEQ ID NO: 150627 - protein, 10 aa, synthetic construct
NNHRGDFNNL

SEQ ID NO: 150628 - protein, 10 aa, synthetic construct
NNIRGDFNNL

SEQ ID NO: 150629 - protein, 10 aa, synthetic construct
NNKRGDFNNL

SEQ ID NO: 150630 - protein, 10 aa, synthetic construct
NNLRGDFNNL

SEQ ID NO: 150631 - protein, 10 aa, synthetic construct
NNMRGDFNNL

SEQ ID NO: 150632 - protein, 10 aa, synthetic construct
NNPRGDFNNL

SEQ ID NO: 150633 - protein, 10 aa, synthetic construct
NNRRGDFNNL

SEQ ID NO: 150634 - protein, 10 aa, synthetic construct
NNVRGDFNNL

SEQ ID NO: 150635 - protein, 10 aa, synthetic construct
NNWRGDFNNL

SEQ ID NO: 150636 - protein, 10 aa, synthetic construct
NNYRGDFNNL

SEQ ID NO: 150637 - protein, 10 aa, synthetic construct
NQARGDFNNL

SEQ ID NO: 150638 - protein, 10 aa, synthetic construct
NQDRGDFNNL

SEQ ID NO: 150639 - protein, 10 aa, synthetic construct
NQERGDFNNL

SEQ ID NO: 150640 - protein, 10 aa, synthetic construct
NQNRGDFNNL

SEQ ID NO: 150641 - protein, 10 aa, synthetic construct
NQQRGDFNNL

SEQ ID NO: 150642 - protein, 10 aa, synthetic construct
NQSRGDFNNL

SEQ ID NO: 150643 - protein, 10 aa, synthetic construct
NQTRGDFNNL

SEQ ID NO: 150644 - protein, 10 aa, synthetic construct
NQFRGDFNNL

SEQ ID NO: 150645 - protein, 10 aa, synthetic construct
NQGRGDFNNL

SEQ ID NO: 150646 - protein, 10 aa, synthetic construct
NQHRGDFNNL

SEQ ID NO: 150647 - protein, 10 aa, synthetic construct
NQIRGDFNNL

SEQ ID NO: 150648 - protein, 10 aa, synthetic construct
NQKRGDFNNL

SEQ ID NO: 150649 - protein, 10 aa, synthetic construct
NQLRGDFNNL

SEQ ID NO: 150650 - protein, 10 aa, synthetic construct
NQMRGDFNNL

SEQ ID NO: 150651 - protein, 10 aa, synthetic construct
NQPRGDFNNL

SEQ ID NO: 150652 - protein, 10 aa, synthetic construct
NQRRGDFNNL

SEQ ID NO: 150653 - protein, 10 aa, synthetic construct
NQVRGDFNNL

SEQ ID NO: 150654 - protein, 10 aa, synthetic construct
NQWRGDFNNL

SEQ ID NO: 150655 - protein, 10 aa, synthetic construct
NQYRGDFNNL

SEQ ID NO: 150656 - protein, 10 aa, synthetic construct
NSARGDFNNL

SEQ ID NO: 150657 - protein, 10 aa, synthetic construct
NSDRGDFNNL

SEQ ID NO: 150658 - protein, 10 aa, synthetic construct
NSERGDFNNL

SEQ ID NO: 150659 - protein, 10 aa, synthetic construct
NSNRGDFNNL

SEQ ID NO: 150660 - protein, 10 aa, synthetic construct
NSQRGDFNNL

SEQ ID NO: 150661 - protein, 10 aa, synthetic construct
NSSRGDFNNL

SEQ ID NO: 150662 - protein, 10 aa, synthetic construct
NSTRGDFNNL

SEQ ID NO: 150663 - protein, 10 aa, synthetic construct
NSFRGDFNNL

SEQ ID NO: 150664 - protein, 10 aa, synthetic construct
NSGRGDFNNL

SEQ ID NO: 150665 - protein, 10 aa, synthetic construct
NSHRGDFNNL

SEQ ID NO: 150666 - protein, 10 aa, synthetic construct
NSIRGDFNNL

SEQ ID NO: 150667 - protein, 10 aa, synthetic construct
NSKRGDFNNL

SEQ ID NO: 150668 - protein, 10 aa, synthetic construct
NSLRGDFNNL

SEQ ID NO: 150669 - protein, 10 aa, synthetic construct
NSMRGDFNNL

SEQ ID NO: 150670 - protein, 10 aa, synthetic construct
NSPRGDFNNL

SEQ ID NO: 150671 - protein, 10 aa, synthetic construct
NSRRGDFNNL

SEQ ID NO: 150672 - protein, 10 aa, synthetic construct
NSVRGDFNNL

SEQ ID NO: 150673 - protein, 10 aa, synthetic construct
NSWRGDFNNL

SEQ ID NO: 150674 - protein, 10 aa, synthetic construct
NSYRGDFNNL

SEQ ID NO: 150675 - protein, 10 aa, synthetic construct
NTARGDFNNL

SEQ ID NO: 150676 - protein, 10 aa, synthetic construct
NTDRGDFNNL

SEQ ID NO: 150677 - protein, 10 aa, synthetic construct
NTERGDFNNL

SEQ ID NO: 150678 - protein, 10 aa, synthetic construct
NTNRGDFNNL

SEQ ID NO: 150679 - protein, 10 aa, synthetic construct
NTQRGDFNNL

SEQ ID NO: 150680 - protein, 10 aa, synthetic construct
NTSRGDFNNL

SEQ ID NO: 150681 - protein, 10 aa, synthetic construct
NTTRGDFNNL

SEQ ID NO: 150682 - protein, 10 aa, synthetic construct
NTFRGDFNNL

SEQ ID NO: 150683 - protein, 10 aa, synthetic construct
NTGRGDFNNL

SEQ ID NO: 150684 - protein, 10 aa, synthetic construct
NTHRGDFNNL

SEQ ID NO: 150685 - protein, 10 aa, synthetic construct
NTIRGDFNNL

SEQ ID NO: 150686 - protein, 10 aa, synthetic construct
NTKRGDFNNL

SEQ ID NO: 150687 - protein, 10 aa, synthetic construct
NTLRGDFNNL

SEQ ID NO: 150688 - protein, 10 aa, synthetic construct
NTMRGDFNNL

SEQ ID NO: 150689 - protein, 10 aa, synthetic construct
NTPRGDFNNL

SEQ ID NO: 150690 - protein, 10 aa, synthetic construct
NTRRGDFNNL

SEQ ID NO: 150691 - protein, 10 aa, synthetic construct
NTVRGDFNNL

SEQ ID NO: 150692 - protein, 10 aa, synthetic construct
NTWRGDFNNL

SEQ ID NO: 150693 - protein, 10 aa, synthetic construct
NTYRGDFNNL

SEQ ID NO: 150694 - protein, 10 aa, synthetic construct
NFARGDFNNL

SEQ ID NO: 150695 - protein, 10 aa, synthetic construct
NFDRGDFNNL

SEQ ID NO: 150696 - protein, 10 aa, synthetic construct
NFERGDFNNL

SEQ ID NO: 150697 - protein, 10 aa, synthetic construct
NFNRGDFNNL

SEQ ID NO: 150698 - protein, 10 aa, synthetic construct
NFQRGDFNNL

SEQ ID NO: 150699 - protein, 10 aa, synthetic construct
NFSRGDFNNL

SEQ ID NO: 150700 - protein, 10 aa, synthetic construct
NFTRGDFNNL

SEQ ID NO: 150701 - protein, 10 aa, synthetic construct
NFFRGDFNNL

SEQ ID NO: 150702 - protein, 10 aa, synthetic construct
NFGRGDFNNL

SEQ ID NO: 150703 - protein, 10 aa, synthetic construct
NFHRGDFNNL

SEQ ID NO: 150704 - protein, 10 aa, synthetic construct
NFIRGDFNNL

SEQ ID NO: 150705 - protein, 10 aa, synthetic construct
NFKRGDFNNL

SEQ ID NO: 150706 - protein, 10 aa, synthetic construct
NFLRGDFNNL

SEQ ID NO: 150707 - protein, 10 aa, synthetic construct
NFMRGDFNNL

SEQ ID NO: 150708 - protein, 10 aa, synthetic construct
NFPRGDFNNL

SEQ ID NO: 150709 - protein, 10 aa, synthetic construct
NFRRGDFNNL

SEQ ID NO: 150710 - protein, 10 aa, synthetic construct
NFVRGDFNNL

SEQ ID NO: 150711 - protein, 10 aa, synthetic construct
NFWRGDFNNL

SEQ ID NO: 150712 - protein, 10 aa, synthetic construct
NFYRGDFNNL

SEQ ID NO: 150713 - protein, 10 aa, synthetic construct
NGARGDFNNL

SEQ ID NO: 150714 - protein, 10 aa, synthetic construct
NGDRGDFNNL

SEQ ID NO: 150715 - protein, 10 aa, synthetic construct
NGERGDFNNL

SEQ ID NO: 150716 - protein, 10 aa, synthetic construct
NGNRGDFNNL

SEQ ID NO: 150717 - protein, 10 aa, synthetic construct
NGQRGDFNNL

SEQ ID NO: 150718 - protein, 10 aa, synthetic construct
NGSRGDFNNL

SEQ ID NO: 150719 - protein, 10 aa, synthetic construct
NGTRGDFNNL

SEQ ID NO: 150720 - protein, 10 aa, synthetic construct
NGFRGDFNNL

SEQ ID NO: 150721 - protein, 10 aa, synthetic construct
NGGRGDFNNL

SEQ ID NO: 150722 - protein, 10 aa, synthetic construct
NGHRGDFNNL

SEQ ID NO: 150723 - protein, 10 aa, synthetic construct
NGIRGDFNNL

SEQ ID NO: 150724 - protein, 10 aa, synthetic construct
NGKRGDFNNL

SEQ ID NO: 150725 - protein, 10 aa, synthetic construct
NGLRGDFNNL

SEQ ID NO: 150726 - protein, 10 aa, synthetic construct
NGMRGDFNNL

SEQ ID NO: 150727 - protein, 10 aa, synthetic construct
NGPRGDFNNL

SEQ ID NO: 150728 - protein, 10 aa, synthetic construct
NGRRGDFNNL

SEQ ID NO: 150729 - protein, 10 aa, synthetic construct
NGVRGDFNNL

SEQ ID NO: 150730 - protein, 10 aa, synthetic construct
NGWRGDFNNL

SEQ ID NO: 150731 - protein, 10 aa, synthetic construct
NGYRGDFNNL

SEQ ID NO: 150732 - protein, 10 aa, synthetic construct
NHARGDFNNL

SEQ ID NO: 150733 - protein, 10 aa, synthetic construct
NHDRGDFNNL

SEQ ID NO: 150734 - protein, 10 aa, synthetic construct
NHERGDFNNL

SEQ ID NO: 150735 - protein, 10 aa, synthetic construct
NHNRGDFNNL

SEQ ID NO: 150736 - protein, 10 aa, synthetic construct
NHQRGDFNNL

SEQ ID NO: 150737 - protein, 10 aa, synthetic construct
NHSRGDFNNL

SEQ ID NO: 150738 - protein, 10 aa, synthetic construct
NHTRGDFNNL

SEQ ID NO: 150739 - protein, 10 aa, synthetic construct
NHFRGDFNNL

SEQ ID NO: 150740 - protein, 10 aa, synthetic construct
NHGRGDFNNL

SEQ ID NO: 150741 - protein, 10 aa, synthetic construct
NHHRGDFNNL

SEQ ID NO: 150742 - protein, 10 aa, synthetic construct
NHIRGDFNNL

SEQ ID NO: 150743 - protein, 10 aa, synthetic construct
NHKRGDFNNL

SEQ ID NO: 150744 - protein, 10 aa, synthetic construct
NHLRGDFNNL

SEQ ID NO: 150745 - protein, 10 aa, synthetic construct
NHMRGDFNNL

SEQ ID NO: 150746 - protein, 10 aa, synthetic construct
NHPRGDFNNL

SEQ ID NO: 150747 - protein, 10 aa, synthetic construct
NHRRGDFNNL

SEQ ID NO: 150748 - protein, 10 aa, synthetic construct
NHVRGDFNNL

SEQ ID NO: 150749 - protein, 10 aa, synthetic construct
NHWRGDFNNL

SEQ ID NO: 150750 - protein, 10 aa, synthetic construct
NHYRGDFNNL

SEQ ID NO: 150751 - protein, 10 aa, synthetic construct
NIARGDFNNL

SEQ ID NO: 150752 - protein, 10 aa, synthetic construct
NIDRGDFNNL

SEQ ID NO: 150753 - protein, 10 aa, synthetic construct
NIERGDFNNL

SEQ ID NO: 150754 - protein, 10 aa, synthetic construct
NINRGDFNNL

SEQ ID NO: 150755 - protein, 10 aa, synthetic construct
NIQRGDFNNL

SEQ ID NO: 150756 - protein, 10 aa, synthetic construct
NISRGDFNNL

SEQ ID NO: 150757 - protein, 10 aa, synthetic construct
NITRGDFNNL

SEQ ID NO: 150758 - protein, 10 aa, synthetic construct
NIFRGDFNNL

SEQ ID NO: 150759 - protein, 10 aa, synthetic construct
NIGRGDFNNL

SEQ ID NO: 150760 - protein, 10 aa, synthetic construct
NIHRGDFNNL

SEQ ID NO: 150761 - protein, 10 aa, synthetic construct
NIIRGDFNNL

SEQ ID NO: 150762 - protein, 10 aa, synthetic construct
NIKRGDFNNL

SEQ ID NO: 150763 - protein, 10 aa, synthetic construct
NILRGDFNNL

SEQ ID NO: 150764 - protein, 10 aa, synthetic construct
NIMRGDFNNL

SEQ ID NO: 150765 - protein, 10 aa, synthetic construct
NIPRGDFNNL

SEQ ID NO: 150766 - protein, 10 aa, synthetic construct
NIRRGDFNNL

SEQ ID NO: 150767 - protein, 10 aa, synthetic construct
NIVRGDFNNL

SEQ ID NO: 150768 - protein, 10 aa, synthetic construct
NIWRGDFNNL

SEQ ID NO: 150769 - protein, 10 aa, synthetic construct
NIYRGDFNNL

SEQ ID NO: 150770 - protein, 10 aa, synthetic construct
NKARGDFNNL

SEQ ID NO: 150771 - protein, 10 aa, synthetic construct
NKDRGDFNNL

SEQ ID NO: 150772 - protein, 10 aa, synthetic construct
NKERGDFNNL

SEQ ID NO: 150773 - protein, 10 aa, synthetic construct
NKNRGDFNNL

SEQ ID NO: 150774 - protein, 10 aa, synthetic construct
NKQRGDFNNL

SEQ ID NO: 150775 - protein, 10 aa, synthetic construct
NKSRGDFNNL

SEQ ID NO: 150776 - protein, 10 aa, synthetic construct
NKTRGDFNNL

SEQ ID NO: 150777 - protein, 10 aa, synthetic construct
NKFRGDFNNL

SEQ ID NO: 150778 - protein, 10 aa, synthetic construct
NKGRGDFNNL

SEQ ID NO: 150779 - protein, 10 aa, synthetic construct
NKHRGDFNNL

SEQ ID NO: 150780 - protein, 10 aa, synthetic construct
NKIRGDFNNL

SEQ ID NO: 150781 - protein, 10 aa, synthetic construct
NKKRGDFNNL

SEQ ID NO: 150782 - protein, 10 aa, synthetic construct
NKLRGDFNNL

SEQ ID NO: 150783 - protein, 10 aa, synthetic construct
NKMRGDFNNL

SEQ ID NO: 150784 - protein, 10 aa, synthetic construct
NKPRGDFNNL

SEQ ID NO: 150785 - protein, 10 aa, synthetic construct
NKRRGDFNNL

SEQ ID NO: 150786 - protein, 10 aa, synthetic construct
NKVRGDFNNL

SEQ ID NO: 150787 - protein, 10 aa, synthetic construct
NKWRGDFNNL

SEQ ID NO: 150788 - protein, 10 aa, synthetic construct
NKYRGDFNNL

SEQ ID NO: 150789 - protein, 10 aa, synthetic construct
NLARGDFNNL

SEQ ID NO: 150790 - protein, 10 aa, synthetic construct
NLDRGDFNNL

SEQ ID NO: 150791 - protein, 10 aa, synthetic construct
NLERGDFNNL

SEQ ID NO: 150792 - protein, 10 aa, synthetic construct
NLNRGDFNNL

SEQ ID NO: 150793 - protein, 10 aa, synthetic construct
NLQRGDFNNL

SEQ ID NO: 150794 - protein, 10 aa, synthetic construct
NLSRGDFNNL

SEQ ID NO: 150795 - protein, 10 aa, synthetic construct
NLTRGDFNNL

SEQ ID NO: 150796 - protein, 10 aa, synthetic construct
NLFRGDFNNL

SEQ ID NO: 150797 - protein, 10 aa, synthetic construct
NLGRGDFNNL

SEQ ID NO: 150798 - protein, 10 aa, synthetic construct
NLHRGDFNNL

SEQ ID NO: 150799 - protein, 10 aa, synthetic construct
NLIRGDFNNL

SEQ ID NO: 150800 - protein, 10 aa, synthetic construct
NLKRGDFNNL

SEQ ID NO: 150801 - protein, 10 aa, synthetic construct
NLLRGDFNNL

SEQ ID NO: 150802 - protein, 10 aa, synthetic construct
NLMRGDFNNL

SEQ ID NO: 150803 - protein, 10 aa, synthetic construct
NLPRGDFNNL

SEQ ID NO: 150804 - protein, 10 aa, synthetic construct
NLRRGDFNNL

SEQ ID NO: 150805 - protein, 10 aa, synthetic construct
NLVRGDFNNL

SEQ ID NO: 150806 - protein, 10 aa, synthetic construct
NLWRGDFNNL

SEQ ID NO: 150807 - protein, 10 aa, synthetic construct
NLYRGDFNNL

SEQ ID NO: 150808 - protein, 10 aa, synthetic construct
NMARGDFNNL

SEQ ID NO: 150809 - protein, 10 aa, synthetic construct
NMDRGDFNNL

SEQ ID NO: 150810 - protein, 10 aa, synthetic construct
NMERGDFNNL

SEQ ID NO: 150811 - protein, 10 aa, synthetic construct
NMNRGDFNNL

SEQ ID NO: 150812 - protein, 10 aa, synthetic construct
NMQRGDFNNL

SEQ ID NO: 150813 - protein, 10 aa, synthetic construct
NMSRGDFNNL

SEQ ID NO: 150814 - protein, 10 aa, synthetic construct
NMTRGDFNNL

SEQ ID NO: 150815 - protein, 10 aa, synthetic construct
NMFRGDFNNL

SEQ ID NO: 150816 - protein, 10 aa, synthetic construct
NMGRGDFNNL

SEQ ID NO: 150817 - protein, 10 aa, synthetic construct
NMHRGDFNNL

SEQ ID NO: 150818 - protein, 10 aa, synthetic construct
NMIRGDFNNL

SEQ ID NO: 150819 - protein, 10 aa, synthetic construct
NMKRGDFNNL

SEQ ID NO: 150820 - protein, 10 aa, synthetic construct
NMLRGDFNNL

SEQ ID NO: 150821 - protein, 10 aa, synthetic construct
NMMRGDFNNL

SEQ ID NO: 150822 - protein, 10 aa, synthetic construct
NMPRGDFNNL

SEQ ID NO: 150823 - protein, 10 aa, synthetic construct
NMRRGDFNNL

SEQ ID NO: 150824 - protein, 10 aa, synthetic construct
NMVRGDFNNL

SEQ ID NO: 150825 - protein, 10 aa, synthetic construct
NMWRGDFNNL

SEQ ID NO: 150826 - protein, 10 aa, synthetic construct
NMYRGDFNNL

SEQ ID NO: 150827 - protein, 10 aa, synthetic construct
NPARGDFNNL

SEQ ID NO: 150828 - protein, 10 aa, synthetic construct
NPDRGDFNNL

SEQ ID NO: 150829 - protein, 10 aa, synthetic construct
NPERGDFNNL

SEQ ID NO: 150830 - protein, 10 aa, synthetic construct
NPNRGDFNNL

SEQ ID NO: 150831 - protein, 10 aa, synthetic construct
NPQRGDFNNL

SEQ ID NO: 150832 - protein, 10 aa, synthetic construct
NPSRGDFNNL

SEQ ID NO: 150833 - protein, 10 aa, synthetic construct
NPTRGDFNNL

SEQ ID NO: 150834 - protein, 10 aa, synthetic construct
NPFRGDFNNL

SEQ ID NO: 150835 - protein, 10 aa, synthetic construct
NPGRGDFNNL

SEQ ID NO: 150836 - protein, 10 aa, synthetic construct
NPHRGDFNNL

SEQ ID NO: 150837 - protein, 10 aa, synthetic construct
NPIRGDFNNL

SEQ ID NO: 150838 - protein, 10 aa, synthetic construct
NPKRGDFNNL

SEQ ID NO: 150839 - protein, 10 aa, synthetic construct
NPLRGDFNNL

SEQ ID NO: 150840 - protein, 10 aa, synthetic construct
NPMRGDFNNL

SEQ ID NO: 150841 - protein, 10 aa, synthetic construct
NPPRGDFNNL

SEQ ID NO: 150842 - protein, 10 aa, synthetic construct
NPRRGDFNNL

SEQ ID NO: 150843 - protein, 10 aa, synthetic construct
NPVRGDFNNL

SEQ ID NO: 150844 - protein, 10 aa, synthetic construct
NPWRGDFNNL

SEQ ID NO: 150845 - protein, 10 aa, synthetic construct
NPYRGDFNNL

SEQ ID NO: 150846 - protein, 10 aa, synthetic construct
NRARGDFNNL

SEQ ID NO: 150847 - protein, 10 aa, synthetic construct
NRDRGDFNNL

SEQ ID NO: 150848 - protein, 10 aa, synthetic construct
NRERGDFNNL

SEQ ID NO: 150849 - protein, 10 aa, synthetic construct
NRNRGDFNNL

SEQ ID NO: 150850 - protein, 10 aa, synthetic construct
NRQRGDFNNL

SEQ ID NO: 150851 - protein, 10 aa, synthetic construct
NRSRGDFNNL

SEQ ID NO: 150852 - protein, 10 aa, synthetic construct
NRTRGDFNNL

SEQ ID NO: 150853 - protein, 10 aa, synthetic construct
NRFRGDFNNL

SEQ ID NO: 150854 - protein, 10 aa, synthetic construct
NRGRGDFNNL

SEQ ID NO: 150855 - protein, 10 aa, synthetic construct
NRHRGDFNNL

SEQ ID NO: 150856 - protein, 10 aa, synthetic construct
NRIRGDFNNL

SEQ ID NO: 150857 - protein, 10 aa, synthetic construct
NRKRGDFNNL

SEQ ID NO: 150858 - protein, 10 aa, synthetic construct
NRLRGDFNNL

SEQ ID NO: 150859 - protein, 10 aa, synthetic construct
NRMRGDFNNL

SEQ ID NO: 150860 - protein, 10 aa, synthetic construct
NRPRGDFNNL

SEQ ID NO: 150861 - protein, 10 aa, synthetic construct
NRRRGDFNNL

SEQ ID NO: 150862 - protein, 10 aa, synthetic construct
NRVRGDFNNL

SEQ ID NO: 150863 - protein, 10 aa, synthetic construct
NRWRGDFNNL

SEQ ID NO: 150864 - protein, 10 aa, synthetic construct
NRYRGDFNNL

SEQ ID NO: 150865 - protein, 10 aa, synthetic construct
NVARGDFNNL

SEQ ID NO: 150866 - protein, 10 aa, synthetic construct
NVDRGDFNNL

SEQ ID NO: 150867 - protein, 10 aa, synthetic construct
NVERGDFNNL

SEQ ID NO: 150868 - protein, 10 aa, synthetic construct
NVNRGDFNNL

SEQ ID NO: 150869 - protein, 10 aa, synthetic construct
NVQRGDFNNL

SEQ ID NO: 150870 - protein, 10 aa, synthetic construct
NVSRGDFNNL

SEQ ID NO: 150871 - protein, 10 aa, synthetic construct
NVTRGDFNNL

SEQ ID NO: 150872 - protein, 10 aa, synthetic construct
NVFRGDFNNL

SEQ ID NO: 150873 - protein, 10 aa, synthetic construct
NVGRGDFNNL

SEQ ID NO: 150874 - protein, 10 aa, synthetic construct
NVHRGDFNNL

SEQ ID NO: 150875 - protein, 10 aa, synthetic construct
NVIRGDFNNL

SEQ ID NO: 150876 - protein, 10 aa, synthetic construct
NVKRGDFNNL

SEQ ID NO: 150877 - protein, 10 aa, synthetic construct
NVLRGDFNNL

SEQ ID NO: 150878 - protein, 10 aa, synthetic construct
NVMRGDFNNL

SEQ ID NO: 150879 - protein, 10 aa, synthetic construct
NVPRGDFNNL

SEQ ID NO: 150880 - protein, 10 aa, synthetic construct
NVRRGDFNNL

SEQ ID NO: 150881 - protein, 10 aa, synthetic construct
NVVRGDFNNL

SEQ ID NO: 150882 - protein, 10 aa, synthetic construct
NVWRGDFNNL

SEQ ID NO: 150883 - protein, 10 aa, synthetic construct
NVYRGDFNNL

SEQ ID NO: 150884 - protein, 10 aa, synthetic construct
NWARGDFNNL

SEQ ID NO: 150885 - protein, 10 aa, synthetic construct
NWDRGDFNNL

SEQ ID NO: 150886 - protein, 10 aa, synthetic construct
NWERGDFNNL

SEQ ID NO: 150887 - protein, 10 aa, synthetic construct
NWNRGDFNNL

SEQ ID NO: 150888 - protein, 10 aa, synthetic construct
NWQRGDFNNL

SEQ ID NO: 150889 - protein, 10 aa, synthetic construct
NWSRGDFNNL

SEQ ID NO: 150890 - protein, 10 aa, synthetic construct
NWTRGDFNNL

SEQ ID NO: 150891 - protein, 10 aa, synthetic construct
NWFRGDFNNL

SEQ ID NO: 150892 - protein, 10 aa, synthetic construct
NWGRGDFNNL

SEQ ID NO: 150893 - protein, 10 aa, synthetic construct
NWHRGDFNNL

SEQ ID NO: 150894 - protein, 10 aa, synthetic construct
NWIRGDFNNL

SEQ ID NO: 150895 - protein, 10 aa, synthetic construct
NWKRGDFNNL

SEQ ID NO: 150896 - protein, 10 aa, synthetic construct
NWLRGDFNNL

SEQ ID NO: 150897 - protein, 10 aa, synthetic construct
NWMRGDFNNL

SEQ ID NO: 150898 - protein, 10 aa, synthetic construct
NWPRGDFNNL

SEQ ID NO: 150899 - protein, 10 aa, synthetic construct
NWRRGDFNNL

SEQ ID NO: 150900 - protein, 10 aa, synthetic construct
NWVRGDFNNL

SEQ ID NO: 150901 - protein, 10 aa, synthetic construct
NWWRGDFNNL

SEQ ID NO: 150902 - protein, 10 aa, synthetic construct
NWYRGDFNNL

SEQ ID NO: 150903 - protein, 10 aa, synthetic construct
NYARGDFNNL

SEQ ID NO: 150904 - protein, 10 aa, synthetic construct
NYDRGDFNNL

SEQ ID NO: 150905 - protein, 10 aa, synthetic construct
NYERGDFNNL

SEQ ID NO: 150906 - protein, 10 aa, synthetic construct
NYNRGDFNNL

SEQ ID NO: 150907 - protein, 10 aa, synthetic construct
NYQRGDFNNL

SEQ ID NO: 150908 - protein, 10 aa, synthetic construct
NYSRGDFNNL

SEQ ID NO: 150909 - protein, 10 aa, synthetic construct
NYTRGDFNNL

SEQ ID NO: 150910 - protein, 10 aa, synthetic construct
NYFRGDFNNL

SEQ ID NO: 150911 - protein, 10 aa, synthetic construct
NYGRGDFNNL

SEQ ID NO: 150912 - protein, 10 aa, synthetic construct
NYHRGDFNNL

SEQ ID NO: 150913 - protein, 10 aa, synthetic construct
NYIRGDFNNL

SEQ ID NO: 150914 - protein, 10 aa, synthetic construct
NYKRGDFNNL

SEQ ID NO: 150915 - protein, 10 aa, synthetic construct
NYLRGDFNNL

SEQ ID NO: 150916 - protein, 10 aa, synthetic construct
NYMRGDFNNL

SEQ ID NO: 150917 - protein, 10 aa, synthetic construct
NYPRGDFNNL

SEQ ID NO: 150918 - protein, 10 aa, synthetic construct
NYRRGDFNNL

SEQ ID NO: 150919 - protein, 10 aa, synthetic construct
NYVRGDFNNL

SEQ ID NO: 150920 - protein, 10 aa, synthetic construct
NYWRGDFNNL

SEQ ID NO: 150921 - protein, 10 aa, synthetic construct
NYYRGDFNNL

SEQ ID NO: 150922 - protein, 10 aa, synthetic construct
QAARGDFNNL

SEQ ID NO: 150923 - protein, 10 aa, synthetic construct
QADRGDFNNL

SEQ ID NO: 150924 - protein, 10 aa, synthetic construct
QAERGDFNNL

SEQ ID NO: 150925 - protein, 10 aa, synthetic construct
QANRGDFNNL

SEQ ID NO: 150926 - protein, 10 aa, synthetic construct
QAQRGDFNNL

SEQ ID NO: 150927 - protein, 10 aa, synthetic construct
QASRGDFNNL

SEQ ID NO: 150928 - protein, 10 aa, synthetic construct
QATRGDFNNL

SEQ ID NO: 150929 - protein, 10 aa, synthetic construct
QAFRGDFNNL

SEQ ID NO: 150930 - protein, 10 aa, synthetic construct
QAGRGDFNNL

SEQ ID NO: 150931 - protein, 10 aa, synthetic construct
QAHRGDFNNL

SEQ ID NO: 150932 - protein, 10 aa, synthetic construct
QAIRGDFNNL

SEQ ID NO: 150933 - protein, 10 aa, synthetic construct
QAKRGDFNNL

SEQ ID NO: 150934 - protein, 10 aa, synthetic construct
QALRGDFNNL

SEQ ID NO: 150935 - protein, 10 aa, synthetic construct
QAMRGDFNNL

SEQ ID NO: 150936 - protein, 10 aa, synthetic construct
QAPRGDFNNL

SEQ ID NO: 150937 - protein, 10 aa, synthetic construct
QARRGDFNNL

SEQ ID NO: 150938 - protein, 10 aa, synthetic construct
QAVRGDFNNL

SEQ ID NO: 150939 - protein, 10 aa, synthetic construct
QAWRGDFNNL

SEQ ID NO: 150940 - protein, 10 aa, synthetic construct
QAYRGDFNNL

SEQ ID NO: 150941 - protein, 10 aa, synthetic construct
QDARGDFNNL

SEQ ID NO: 150942 - protein, 10 aa, synthetic construct
QDDRGDFNNL

SEQ ID NO: 150943 - protein, 10 aa, synthetic construct
QDERGDFNNL

SEQ ID NO: 150944 - protein, 10 aa, synthetic construct
QDNRGDFNNL

SEQ ID NO: 150945 - protein, 10 aa, synthetic construct
QDQRGDFNNL

SEQ ID NO: 150946 - protein, 10 aa, synthetic construct
QDSRGDFNNL

SEQ ID NO: 150947 - protein, 10 aa, synthetic construct
QDTRGDFNNL

SEQ ID NO: 150948 - protein, 10 aa, synthetic construct
QDFRGDFNNL

SEQ ID NO: 150949 - protein, 10 aa, synthetic construct
QDGRGDFNNL

SEQ ID NO: 150950 - protein, 10 aa, synthetic construct
QDHRGDFNNL

SEQ ID NO: 150951 - protein, 10 aa, synthetic construct
QDIRGDFNNL

SEQ ID NO: 150952 - protein, 10 aa, synthetic construct
QDKRGDFNNL

SEQ ID NO: 150953 - protein, 10 aa, synthetic construct
QDLRGDFNNL

SEQ ID NO: 150954 - protein, 10 aa, synthetic construct
QDMRGDFNNL

SEQ ID NO: 150955 - protein, 10 aa, synthetic construct
QDPRGDFNNL

SEQ ID NO: 150956 - protein, 10 aa, synthetic construct
QDRRGDFNNL

SEQ ID NO: 150957 - protein, 10 aa, synthetic construct
QDVRGDFNNL

SEQ ID NO: 150958 - protein, 10 aa, synthetic construct
QDWRGDFNNL

SEQ ID NO: 150959 - protein, 10 aa, synthetic construct
QDYRGDFNNL

SEQ ID NO: 150960 - protein, 10 aa, synthetic construct
QEARGDFNNL

SEQ ID NO: 150961 - protein, 10 aa, synthetic construct
QEDRGDFNNL

SEQ ID NO: 150962 - protein, 10 aa, synthetic construct
QEERGDFNNL

SEQ ID NO: 150963 - protein, 10 aa, synthetic construct
QENRGDFNNL

SEQ ID NO: 150964 - protein, 10 aa, synthetic construct
QEQRGDFNNL

SEQ ID NO: 150965 - protein, 10 aa, synthetic construct
QESRGDFNNL

SEQ ID NO: 150966 - protein, 10 aa, synthetic construct
QETRGDFNNL

SEQ ID NO: 150967 - protein, 10 aa, synthetic construct
QEFRGDFNNL

SEQ ID NO: 150968 - protein, 10 aa, synthetic construct
QEGRGDFNNL

SEQ ID NO: 150969 - protein, 10 aa, synthetic construct
QEHRGDFNNL

SEQ ID NO: 150970 - protein, 10 aa, synthetic construct
QEIRGDFNNL

SEQ ID NO: 150971 - protein, 10 aa, synthetic construct
QEKRGDFNNL

SEQ ID NO: 150972 - protein, 10 aa, synthetic construct
QELRGDFNNL

SEQ ID NO: 150973 - protein, 10 aa, synthetic construct
QEMRGDFNNL

SEQ ID NO: 150974 - protein, 10 aa, synthetic construct
QEPRGDFNNL

SEQ ID NO: 150975 - protein, 10 aa, synthetic construct
QERRGDFNNL

SEQ ID NO: 150976 - protein, 10 aa, synthetic construct
QEVRGDFNNL

SEQ ID NO: 150977 - protein, 10 aa, synthetic construct
QEWRGDFNNL

SEQ ID NO: 150978 - protein, 10 aa, synthetic construct
QEYRGDFNNL

SEQ ID NO: 150979 - protein, 10 aa, synthetic construct
QNARGDFNNL

SEQ ID NO: 150980 - protein, 10 aa, synthetic construct
QNDRGDFNNL

SEQ ID NO: 150981 - protein, 10 aa, synthetic construct
QNERGDFNNL

SEQ ID NO: 150982 - protein, 10 aa, synthetic construct
QNNRGDFNNL

SEQ ID NO: 150983 - protein, 10 aa, synthetic construct
QNQRGDFNNL

SEQ ID NO: 150984 - protein, 10 aa, synthetic construct
QNSRGDFNNL

SEQ ID NO: 150985 - protein, 10 aa, synthetic construct
QNTRGDFNNL

SEQ ID NO: 150986 - protein, 10 aa, synthetic construct
QNFRGDFNNL

SEQ ID NO: 150987 - protein, 10 aa, synthetic construct
QNGRGDFNNL

SEQ ID NO: 150988 - protein, 10 aa, synthetic construct
QNHRGDFNNL

SEQ ID NO: 150989 - protein, 10 aa, synthetic construct
QNIRGDFNNL

SEQ ID NO: 150990 - protein, 10 aa, synthetic construct
QNKRGDFNNL

SEQ ID NO: 150991 - protein, 10 aa, synthetic construct
QNLRGDFNNL

SEQ ID NO: 150992 - protein, 10 aa, synthetic construct
QNMRGDFNNL

SEQ ID NO: 150993 - protein, 10 aa, synthetic construct
QNPRGDFNNL

SEQ ID NO: 150994 - protein, 10 aa, synthetic construct
QNRRGDFNNL

SEQ ID NO: 150995 - protein, 10 aa, synthetic construct
QNVRGDFNNL

SEQ ID NO: 150996 - protein, 10 aa, synthetic construct
QNWRGDFNNL

SEQ ID NO: 150997 - protein, 10 aa, synthetic construct
QNYRGDFNNL

SEQ ID NO: 150998 - protein, 10 aa, synthetic construct
QQARGDFNNL

SEQ ID NO: 150999 - protein, 10 aa, synthetic construct
QQDRGDFNNL

SEQ ID NO: 151000 - protein, 10 aa, synthetic construct
QQERGDFNNL

SEQ ID NO: 151001 - protein, 10 aa, synthetic construct
QQNRGDFNNL

SEQ ID NO: 151002 - protein, 10 aa, synthetic construct
QQQRGDFNNL

SEQ ID NO: 151003 - protein, 10 aa, synthetic construct
QQSRGDFNNL

SEQ ID NO: 151004 - protein, 10 aa, synthetic construct
QQTRGDFNNL

SEQ ID NO: 151005 - protein, 10 aa, synthetic construct
QQFRGDFNNL

SEQ ID NO: 151006 - protein, 10 aa, synthetic construct
QQGRGDFNNL

SEQ ID NO: 151007 - protein, 10 aa, synthetic construct
QQHRGDFNNL

SEQ ID NO: 151008 - protein, 10 aa, synthetic construct
QQIRGDFNNL

SEQ ID NO: 151009 - protein, 10 aa, synthetic construct
QQKRGDFNNL

SEQ ID NO: 151010 - protein, 10 aa, synthetic construct
QQLRGDFNNL

SEQ ID NO: 151011 - protein, 10 aa, synthetic construct
QQMRGDFNNL

SEQ ID NO: 151012 - protein, 10 aa, synthetic construct
QQPRGDFNNL

SEQ ID NO: 151013 - protein, 10 aa, synthetic construct
QQRRGDFNNL

SEQ ID NO: 151014 - protein, 10 aa, synthetic construct
QQVRGDFNNL

SEQ ID NO: 151015 - protein, 10 aa, synthetic construct
QQWRGDFNNL

SEQ ID NO: 151016 - protein, 10 aa, synthetic construct
QQYRGDFNNL

SEQ ID NO: 151017 - protein, 10 aa, synthetic construct
QSARGDFNNL

SEQ ID NO: 151018 - protein, 10 aa, synthetic construct
QSDRGDFNNL

SEQ ID NO: 151019 - protein, 10 aa, synthetic construct
QSERGDFNNL

SEQ ID NO: 151020 - protein, 10 aa, synthetic construct
QSNRGDFNNL

SEQ ID NO: 151021 - protein, 10 aa, synthetic construct
QSQRGDFNNL

SEQ ID NO: 151022 - protein, 10 aa, synthetic construct
QSSRGDFNNL

SEQ ID NO: 151023 - protein, 10 aa, synthetic construct
QSTRGDFNNL

SEQ ID NO: 151024 - protein, 10 aa, synthetic construct
QSFRGDFNNL

SEQ ID NO: 151025 - protein, 10 aa, synthetic construct
QSGRGDFNNL

SEQ ID NO: 151026 - protein, 10 aa, synthetic construct
QSHRGDFNNL

SEQ ID NO: 151027 - protein, 10 aa, synthetic construct
QSIRGDFNNL

SEQ ID NO: 151028 - protein, 10 aa, synthetic construct
QSKRGDFNNL

SEQ ID NO: 151029 - protein, 10 aa, synthetic construct
QSLRGDFNNL

SEQ ID NO: 151030 - protein, 10 aa, synthetic construct
QSMRGDFNNL

SEQ ID NO: 151031 - protein, 10 aa, synthetic construct
QSPRGDFNNL

SEQ ID NO: 151032 - protein, 10 aa, synthetic construct
QSRRGDFNNL

SEQ ID NO: 151033 - protein, 10 aa, synthetic construct
QSVRGDFNNL

SEQ ID NO: 151034 - protein, 10 aa, synthetic construct
QSWRGDFNNL

SEQ ID NO: 151035 - protein, 10 aa, synthetic construct
QSYRGDFNNL

SEQ ID NO: 151036 - protein, 10 aa, synthetic construct
QTARGDFNNL

SEQ ID NO: 151037 - protein, 10 aa, synthetic construct
QTDRGDFNNL

SEQ ID NO: 151038 - protein, 10 aa, synthetic construct
QTERGDFNNL

SEQ ID NO: 151039 - protein, 10 aa, synthetic construct
QTNRGDFNNL

SEQ ID NO: 151040 - protein, 10 aa, synthetic construct
QTQRGDFNNL

SEQ ID NO: 151041 - protein, 10 aa, synthetic construct
QTSRGDFNNL

SEQ ID NO: 151042 - protein, 10 aa, synthetic construct
QTTRGDFNNL

SEQ ID NO: 151043 - protein, 10 aa, synthetic construct
QTFRGDFNNL

SEQ ID NO: 151044 - protein, 10 aa, synthetic construct
QTGRGDFNNL

SEQ ID NO: 151045 - protein, 10 aa, synthetic construct
QTHRGDFNNL

SEQ ID NO: 151046 - protein, 10 aa, synthetic construct
QTIRGDFNNL

SEQ ID NO: 151047 - protein, 10 aa, synthetic construct
QTKRGDFNNL

SEQ ID NO: 151048 - protein, 10 aa, synthetic construct
QTLRGDFNNL

SEQ ID NO: 151049 - protein, 10 aa, synthetic construct
QTMRGDFNNL

SEQ ID NO: 151050 - protein, 10 aa, synthetic construct
QTPRGDFNNL

SEQ ID NO: 151051 - protein, 10 aa, synthetic construct
QTRRGDFNNL

SEQ ID NO: 151052 - protein, 10 aa, synthetic construct
QTVRGDFNNL

SEQ ID NO: 151053 - protein, 10 aa, synthetic construct
QTWRGDFNNL

SEQ ID NO: 151054 - protein, 10 aa, synthetic construct
QTYRGDFNNL

SEQ ID NO: 151055 - protein, 10 aa, synthetic construct
QFARGDFNNL

SEQ ID NO: 151056 - protein, 10 aa, synthetic construct
QFDRGDFNNL

SEQ ID NO: 151057 - protein, 10 aa, synthetic construct
QFERGDFNNL

SEQ ID NO: 151058 - protein, 10 aa, synthetic construct
QFNRGDFNNL

SEQ ID NO: 151059 - protein, 10 aa, synthetic construct
QFQRGDFNNL

SEQ ID NO: 151060 - protein, 10 aa, synthetic construct
QFSRGDFNNL

SEQ ID NO: 151061 - protein, 10 aa, synthetic construct
QFTRGDFNNL

SEQ ID NO: 151062 - protein, 10 aa, synthetic construct
QFFRGDFNNL

SEQ ID NO: 151063 - protein, 10 aa, synthetic construct
QFGRGDFNNL

SEQ ID NO: 151064 - protein, 10 aa, synthetic construct
QFHRGDFNNL

SEQ ID NO: 151065 - protein, 10 aa, synthetic construct
QFIRGDFNNL

SEQ ID NO: 151066 - protein, 10 aa, synthetic construct
QFKRGDFNNL

SEQ ID NO: 151067 - protein, 10 aa, synthetic construct
QFLRGDFNNL

SEQ ID NO: 151068 - protein, 10 aa, synthetic construct
QFMRGDFNNL

SEQ ID NO: 151069 - protein, 10 aa, synthetic construct
QFPRGDFNNL

SEQ ID NO: 151070 - protein, 10 aa, synthetic construct
QFRRGDFNNL

SEQ ID NO: 151071 - protein, 10 aa, synthetic construct
QFVRGDFNNL

SEQ ID NO: 151072 - protein, 10 aa, synthetic construct
QFWRGDFNNL

SEQ ID NO: 151073 - protein, 10 aa, synthetic construct
QFYRGDFNNL

SEQ ID NO: 151074 - protein, 10 aa, synthetic construct
QGARGDFNNL

SEQ ID NO: 151075 - protein, 10 aa, synthetic construct
QGDRGDFNNL

SEQ ID NO: 151076 - protein, 10 aa, synthetic construct
QGERGDFNNL

SEQ ID NO: 151077 - protein, 10 aa, synthetic construct
QGNRGDFNNL

SEQ ID NO: 151078 - protein, 10 aa, synthetic construct
QGQRGDFNNL

SEQ ID NO: 151079 - protein, 10 aa, synthetic construct
QGSRGDFNNL

SEQ ID NO: 151080 - protein, 10 aa, synthetic construct
QGTRGDFNNL

SEQ ID NO: 151081 - protein, 10 aa, synthetic construct
QGFRGDFNNL

SEQ ID NO: 151082 - protein, 10 aa, synthetic construct
QGGRGDFNNL

SEQ ID NO: 151083 - protein, 10 aa, synthetic construct
QGHRGDFNNL

SEQ ID NO: 151084 - protein, 10 aa, synthetic construct
QGIRGDFNNL

SEQ ID NO: 151085 - protein, 10 aa, synthetic construct
QGKRGDFNNL

SEQ ID NO: 151086 - protein, 10 aa, synthetic construct
QGLRGDFNNL

SEQ ID NO: 151087 - protein, 10 aa, synthetic construct
QGMRGDFNNL

SEQ ID NO: 151088 - protein, 10 aa, synthetic construct
QGPRGDFNNL

SEQ ID NO: 151089 - protein, 10 aa, synthetic construct
QGRRGDFNNL

SEQ ID NO: 151090 - protein, 10 aa, synthetic construct
QGVRGDFNNL

SEQ ID NO: 151091 - protein, 10 aa, synthetic construct
QGWRGDFNNL

SEQ ID NO: 151092 - protein, 10 aa, synthetic construct
QGYRGDFNNL

SEQ ID NO: 151093 - protein, 10 aa, synthetic construct
QHARGDFNNL

SEQ ID NO: 151094 - protein, 10 aa, synthetic construct
QHDRGDFNNL

SEQ ID NO: 151095 - protein, 10 aa, synthetic construct
QHERGDFNNL

SEQ ID NO: 151096 - protein, 10 aa, synthetic construct
QHNRGDFNNL

SEQ ID NO: 151097 - protein, 10 aa, synthetic construct
QHQRGDFNNL

SEQ ID NO: 151098 - protein, 10 aa, synthetic construct
QHSRGDFNNL

SEQ ID NO: 151099 - protein, 10 aa, synthetic construct
QHTRGDFNNL

SEQ ID NO: 151100 - protein, 10 aa, synthetic construct
QHFRGDFNNL

SEQ ID NO: 151101 - protein, 10 aa, synthetic construct
QHGRGDFNNL

SEQ ID NO: 151102 - protein, 10 aa, synthetic construct
QHHRGDFNNL

SEQ ID NO: 151103 - protein, 10 aa, synthetic construct
QHIRGDFNNL

SEQ ID NO: 151104 - protein, 10 aa, synthetic construct
QHKRGDFNNL

SEQ ID NO: 151105 - protein, 10 aa, synthetic construct
QHLRGDFNNL

SEQ ID NO: 151106 - protein, 10 aa, synthetic construct
QHMRGDFNNL

SEQ ID NO: 151107 - protein, 10 aa, synthetic construct
QHPRGDFNNL

SEQ ID NO: 151108 - protein, 10 aa, synthetic construct
QHRRGDFNNL

SEQ ID NO: 151109 - protein, 10 aa, synthetic construct
QHVRGDFNNL

SEQ ID NO: 151110 - protein, 10 aa, synthetic construct
QHWRGDFNNL

SEQ ID NO: 151111 - protein, 10 aa, synthetic construct
QHYRGDFNNL

SEQ ID NO: 151112 - protein, 10 aa, synthetic construct
QIARGDFNNL

SEQ ID NO: 151113 - protein, 10 aa, synthetic construct
QIDRGDFNNL

SEQ ID NO: 151114 - protein, 10 aa, synthetic construct
QIERGDFNNL

SEQ ID NO: 151115 - protein, 10 aa, synthetic construct
QINRGDFNNL

SEQ ID NO: 151116 - protein, 10 aa, synthetic construct
QIQRGDFNNL

SEQ ID NO: 151117 - protein, 10 aa, synthetic construct
QISRGDFNNL

SEQ ID NO: 151118 - protein, 10 aa, synthetic construct
QITRGDFNNL

SEQ ID NO: 151119 - protein, 10 aa, synthetic construct
QIFRGDFNNL

SEQ ID NO: 151120 - protein, 10 aa, synthetic construct
QIGRGDFNNL

SEQ ID NO: 151121 - protein, 10 aa, synthetic construct
QIHRGDFNNL

SEQ ID NO: 151122 - protein, 10 aa, synthetic construct
QIIRGDFNNL

SEQ ID NO: 151123 - protein, 10 aa, synthetic construct
QIKRGDFNNL

SEQ ID NO: 151124 - protein, 10 aa, synthetic construct
QILRGDFNNL

SEQ ID NO: 151125 - protein, 10 aa, synthetic construct
QIMRGDFNNL

SEQ ID NO: 151126 - protein, 10 aa, synthetic construct
QIPRGDFNNL

SEQ ID NO: 151127 - protein, 10 aa, synthetic construct
QIRRGDFNNL

SEQ ID NO: 151128 - protein, 10 aa, synthetic construct
QIVRGDFNNL

SEQ ID NO: 151129 - protein, 10 aa, synthetic construct
QIWRGDFNNL

SEQ ID NO: 151130 - protein, 10 aa, synthetic construct
QIYRGDFNNL

SEQ ID NO: 151131 - protein, 10 aa, synthetic construct
QKARGDFNNL

SEQ ID NO: 151132 - protein, 10 aa, synthetic construct
QKDRGDFNNL

SEQ ID NO: 151133 - protein, 10 aa, synthetic construct
QKERGDFNNL

SEQ ID NO: 151134 - protein, 10 aa, synthetic construct
QKNRGDFNNL

SEQ ID NO: 151135 - protein, 10 aa, synthetic construct
QKQRGDFNNL

SEQ ID NO: 151136 - protein, 10 aa, synthetic construct
QKSRGDFNNL

SEQ ID NO: 151137 - protein, 10 aa, synthetic construct
QKTRGDFNNL

SEQ ID NO: 151138 - protein, 10 aa, synthetic construct
QKFRGDFNNL

SEQ ID NO: 151139 - protein, 10 aa, synthetic construct
QKGRGDFNNL

SEQ ID NO: 151140 - protein, 10 aa, synthetic construct
QKHRGDFNNL

SEQ ID NO: 151141 - protein, 10 aa, synthetic construct
QKIRGDFNNL

SEQ ID NO: 151142 - protein, 10 aa, synthetic construct
QKKRGDFNNL

SEQ ID NO: 151143 - protein, 10 aa, synthetic construct
QKLRGDFNNL

SEQ ID NO: 151144 - protein, 10 aa, synthetic construct
QKMRGDFNNL

SEQ ID NO: 151145 - protein, 10 aa, synthetic construct
QKPRGDFNNL

SEQ ID NO: 151146 - protein, 10 aa, synthetic construct
QKRRGDFNNL

SEQ ID NO: 151147 - protein, 10 aa, synthetic construct
QKVRGDFNNL

SEQ ID NO: 151148 - protein, 10 aa, synthetic construct
QKWRGDFNNL

SEQ ID NO: 151149 - protein, 10 aa, synthetic construct
QKYRGDFNNL

SEQ ID NO: 151150 - protein, 10 aa, synthetic construct
QLARGDFNNL

SEQ ID NO: 151151 - protein, 10 aa, synthetic construct
QLDRGDFNNL

SEQ ID NO: 151152 - protein, 10 aa, synthetic construct
QLERGDFNNL

SEQ ID NO: 151153 - protein, 10 aa, synthetic construct
QLNRGDFNNL

SEQ ID NO: 151154 - protein, 10 aa, synthetic construct
QLQRGDFNNL

SEQ ID NO: 151155 - protein, 10 aa, synthetic construct
QLSRGDFNNL

SEQ ID NO: 151156 - protein, 10 aa, synthetic construct
QLTRGDFNNL

SEQ ID NO: 151157 - protein, 10 aa, synthetic construct
QLFRGDFNNL

SEQ ID NO: 151158 - protein, 10 aa, synthetic construct
QLGRGDFNNL

SEQ ID NO: 151159 - protein, 10 aa, synthetic construct
QLHRGDFNNL

SEQ ID NO: 151160 - protein, 10 aa, synthetic construct
QLIRGDFNNL

SEQ ID NO: 151161 - protein, 10 aa, synthetic construct
QLKRGDFNNL

SEQ ID NO: 151162 - protein, 10 aa, synthetic construct
QLLRGDFNNL

SEQ ID NO: 151163 - protein, 10 aa, synthetic construct
QLMRGDFNNL

SEQ ID NO: 151164 - protein, 10 aa, synthetic construct
QLPRGDFNNL

SEQ ID NO: 151165 - protein, 10 aa, synthetic construct
QLRRGDFNNL

SEQ ID NO: 151166 - protein, 10 aa, synthetic construct
QLVRGDFNNL

SEQ ID NO: 151167 - protein, 10 aa, synthetic construct
QLWRGDFNNL

SEQ ID NO: 151168 - protein, 10 aa, synthetic construct
QLYRGDFNNL

SEQ ID NO: 151169 - protein, 10 aa, synthetic construct
QMARGDFNNL

SEQ ID NO: 151170 - protein, 10 aa, synthetic construct
QMDRGDFNNL

SEQ ID NO: 151171 - protein, 10 aa, synthetic construct
QMERGDFNNL

SEQ ID NO: 151172 - protein, 10 aa, synthetic construct
QMNRGDFNNL

SEQ ID NO: 151173 - protein, 10 aa, synthetic construct
QMQRGDFNNL

SEQ ID NO: 151174 - protein, 10 aa, synthetic construct
QMSRGDFNNL

SEQ ID NO: 151175 - protein, 10 aa, synthetic construct
QMTRGDFNNL

SEQ ID NO: 151176 - protein, 10 aa, synthetic construct
QMFRGDFNNL

SEQ ID NO: 151177 - protein, 10 aa, synthetic construct
QMGRGDFNNL

SEQ ID NO: 151178 - protein, 10 aa, synthetic construct
QMHRGDFNNL

SEQ ID NO: 151179 - protein, 10 aa, synthetic construct
QMIRGDFNNL

SEQ ID NO: 151180 - protein, 10 aa, synthetic construct
QMKRGDFNNL

SEQ ID NO: 151181 - protein, 10 aa, synthetic construct
QMLRGDFNNL

SEQ ID NO: 151182 - protein, 10 aa, synthetic construct
QMMRGDFNNL

SEQ ID NO: 151183 - protein, 10 aa, synthetic construct
QMPRGDFNNL

SEQ ID NO: 151184 - protein, 10 aa, synthetic construct
QMRRGDFNNL

SEQ ID NO: 151185 - protein, 10 aa, synthetic construct
QMVRGDFNNL

SEQ ID NO: 151186 - protein, 10 aa, synthetic construct
QMWRGDFNNL

SEQ ID NO: 151187 - protein, 10 aa, synthetic construct
QMYRGDFNNL

SEQ ID NO: 151188 - protein, 10 aa, synthetic construct
QPARGDFNNL

SEQ ID NO: 151189 - protein, 10 aa, synthetic construct
QPDRGDFNNL

SEQ ID NO: 151190 - protein, 10 aa, synthetic construct
QPERGDFNNL

SEQ ID NO: 151191 - protein, 10 aa, synthetic construct
QPNRGDFNNL

SEQ ID NO: 151192 - protein, 10 aa, synthetic construct
QPQRGDFNNL

SEQ ID NO: 151193 - protein, 10 aa, synthetic construct
QPSRGDFNNL

SEQ ID NO: 151194 - protein, 10 aa, synthetic construct
QPTRGDFNNL

SEQ ID NO: 151195 - protein, 10 aa, synthetic construct
QPFRGDFNNL

SEQ ID NO: 151196 - protein, 10 aa, synthetic construct
QPGRGDFNNL

SEQ ID NO: 151197 - protein, 10 aa, synthetic construct
QPHRGDFNNL

SEQ ID NO: 151198 - protein, 10 aa, synthetic construct
QPIRGDFNNL

SEQ ID NO: 151199 - protein, 10 aa, synthetic construct
QPKRGDFNNL

SEQ ID NO: 151200 - protein, 10 aa, synthetic construct
QPLRGDFNNL

SEQ ID NO: 151201 - protein, 10 aa, synthetic construct
QPMRGDFNNL

SEQ ID NO: 151202 - protein, 10 aa, synthetic construct
QPPRGDFNNL

SEQ ID NO: 151203 - protein, 10 aa, synthetic construct
QPRRGDFNNL

SEQ ID NO: 151204 - protein, 10 aa, synthetic construct
QPVRGDFNNL

SEQ ID NO: 151205 - protein, 10 aa, synthetic construct
QPWRGDFNNL

SEQ ID NO: 151206 - protein, 10 aa, synthetic construct
QPYRGDFNNL

SEQ ID NO: 151207 - protein, 10 aa, synthetic construct
QRARGDFNNL

SEQ ID NO: 151208 - protein, 10 aa, synthetic construct
QRDRGDFNNL

SEQ ID NO: 151209 - protein, 10 aa, synthetic construct
QRERGDFNNL

SEQ ID NO: 151210 - protein, 10 aa, synthetic construct
QRNRGDFNNL

SEQ ID NO: 151211 - protein, 10 aa, synthetic construct
QRQRGDFNNL

SEQ ID NO: 151212 - protein, 10 aa, synthetic construct
QRSRGDFNNL

SEQ ID NO: 151213 - protein, 10 aa, synthetic construct
QRTRGDFNNL

SEQ ID NO: 151214 - protein, 10 aa, synthetic construct
QRFRGDFNNL

SEQ ID NO: 151215 - protein, 10 aa, synthetic construct
QRGRGDFNNL

SEQ ID NO: 151216 - protein, 10 aa, synthetic construct
QRHRGDFNNL

SEQ ID NO: 151217 - protein, 10 aa, synthetic construct
QRIRGDFNNL

SEQ ID NO: 151218 - protein, 10 aa, synthetic construct
QRKRGDFNNL

SEQ ID NO: 151219 - protein, 10 aa, synthetic construct
QRLRGDFNNL

SEQ ID NO: 151220 - protein, 10 aa, synthetic construct
QRMRGDFNNL

SEQ ID NO: 151221 - protein, 10 aa, synthetic construct
QRPRGDFNNL

SEQ ID NO: 151222 - protein, 10 aa, synthetic construct
QRRRGDFNNL

SEQ ID NO: 151223 - protein, 10 aa, synthetic construct
QRVRGDFNNL

SEQ ID NO: 151224 - protein, 10 aa, synthetic construct
QRWRGDFNNL

SEQ ID NO: 151225 - protein, 10 aa, synthetic construct
QRYRGDFNNL

SEQ ID NO: 151226 - protein, 10 aa, synthetic construct
QVARGDFNNL

SEQ ID NO: 151227 - protein, 10 aa, synthetic construct
QVDRGDFNNL

SEQ ID NO: 151228 - protein, 10 aa, synthetic construct
QVERGDFNNL

SEQ ID NO: 151229 - protein, 10 aa, synthetic construct
QVNRGDFNNL

SEQ ID NO: 151230 - protein, 10 aa, synthetic construct
QVQRGDFNNL

SEQ ID NO: 151231 - protein, 10 aa, synthetic construct
QVSRGDFNNL

SEQ ID NO: 151232 - protein, 10 aa, synthetic construct
QVTRGDFNNL

SEQ ID NO: 151233 - protein, 10 aa, synthetic construct
QVFRGDFNNL

SEQ ID NO: 151234 - protein, 10 aa, synthetic construct
QVGRGDFNNL

SEQ ID NO: 151235 - protein, 10 aa, synthetic construct
QVHRGDFNNL

SEQ ID NO: 151236 - protein, 10 aa, synthetic construct
QVIRGDFNNL

SEQ ID NO: 151237 - protein, 10 aa, synthetic construct
QVKRGDFNNL

SEQ ID NO: 151238 - protein, 10 aa, synthetic construct
QVLRGDFNNL

SEQ ID NO: 151239 - protein, 10 aa, synthetic construct
QVMRGDFNNL

SEQ ID NO: 151240 - protein, 10 aa, synthetic construct
QVPRGDFNNL

SEQ ID NO: 151241 - protein, 10 aa, synthetic construct
QVRRGDFNNL

SEQ ID NO: 151242 - protein, 10 aa, synthetic construct
QVVRGDFNNL

SEQ ID NO: 151243 - protein, 10 aa, synthetic construct
QVWRGDFNNL

SEQ ID NO: 151244 - protein, 10 aa, synthetic construct
QVYRGDFNNL

SEQ ID NO: 151245 - protein, 10 aa, synthetic construct
QWARGDFNNL

SEQ ID NO: 151246 - protein, 10 aa, synthetic construct
QWDRGDFNNL

SEQ ID NO: 151247 - protein, 10 aa, synthetic construct
QWERGDFNNL

SEQ ID NO: 151248 - protein, 10 aa, synthetic construct
QWNRGDFNNL

SEQ ID NO: 151249 - protein, 10 aa, synthetic construct
QWQRGDFNNL

SEQ ID NO: 151250 - protein, 10 aa, synthetic construct
QWSRGDFNNL

SEQ ID NO: 151251 - protein, 10 aa, synthetic construct
QWTRGDFNNL

SEQ ID NO: 151252 - protein, 10 aa, synthetic construct
QWFRGDFNNL

SEQ ID NO: 151253 - protein, 10 aa, synthetic construct
QWGRGDFNNL

SEQ ID NO: 151254 - protein, 10 aa, synthetic construct
QWHRGDFNNL

SEQ ID NO: 151255 - protein, 10 aa, synthetic construct
QWIRGDFNNL

SEQ ID NO: 151256 - protein, 10 aa, synthetic construct
QWKRGDFNNL

SEQ ID NO: 151257 - protein, 10 aa, synthetic construct
QWLRGDFNNL

SEQ ID NO: 151258 - protein, 10 aa, synthetic construct
QWMRGDFNNL

SEQ ID NO: 151259 - protein, 10 aa, synthetic construct
QWPRGDFNNL

SEQ ID NO: 151260 - protein, 10 aa, synthetic construct
QWRRGDFNNL

SEQ ID NO: 151261 - protein, 10 aa, synthetic construct
QWVRGDFNNL

SEQ ID NO: 151262 - protein, 10 aa, synthetic construct
QWWRGDFNNL

SEQ ID NO: 151263 - protein, 10 aa, synthetic construct
QWYRGDFNNL

SEQ ID NO: 151264 - protein, 10 aa, synthetic construct
QYARGDFNNL

SEQ ID NO: 151265 - protein, 10 aa, synthetic construct
QYDRGDFNNL

SEQ ID NO: 151266 - protein, 10 aa, synthetic construct
QYERGDFNNL

SEQ ID NO: 151267 - protein, 10 aa, synthetic construct
QYNRGDFNNL

SEQ ID NO: 151268 - protein, 10 aa, synthetic construct
QYQRGDFNNL

SEQ ID NO: 151269 - protein, 10 aa, synthetic construct
QYSRGDFNNL

SEQ ID NO: 151270 - protein, 10 aa, synthetic construct
QYTRGDFNNL

SEQ ID NO: 151271 - protein, 10 aa, synthetic construct
QYFRGDFNNL

SEQ ID NO: 151272 - protein, 10 aa, synthetic construct
QYGRGDFNNL

SEQ ID NO: 151273 - protein, 10 aa, synthetic construct
QYHRGDFNNL

SEQ ID NO: 151274 - protein, 10 aa, synthetic construct
QYIRGDFNNL

SEQ ID NO: 151275 - protein, 10 aa, synthetic construct
QYKRGDFNNL

SEQ ID NO: 151276 - protein, 10 aa, synthetic construct
QYLRGDFNNL

SEQ ID NO: 151277 - protein, 10 aa, synthetic construct
QYMRGDFNNL

SEQ ID NO: 151278 - protein, 10 aa, synthetic construct
QYPRGDFNNL

SEQ ID NO: 151279 - protein, 10 aa, synthetic construct
QYRRGDFNNL

SEQ ID NO: 151280 - protein, 10 aa, synthetic construct
QYVRGDFNNL

SEQ ID NO: 151281 - protein, 10 aa, synthetic construct
QYWRGDFNNL

SEQ ID NO: 151282 - protein, 10 aa, synthetic construct
QYYRGDFNNL

SEQ ID NO: 151283 - protein, 10 aa, synthetic construct
SAARGDFNNL

SEQ ID NO: 151284 - protein, 10 aa, synthetic construct
SADRGDFNNL

SEQ ID NO: 151285 - protein, 10 aa, synthetic construct
SAERGDFNNL

SEQ ID NO: 151286 - protein, 10 aa, synthetic construct
SANRGDFNNL

SEQ ID NO: 151287 - protein, 10 aa, synthetic construct
SAQRGDFNNL

SEQ ID NO: 151288 - protein, 10 aa, synthetic construct
SASRGDFNNL

SEQ ID NO: 151289 - protein, 10 aa, synthetic construct
SATRGDFNNL

SEQ ID NO: 151290 - protein, 10 aa, synthetic construct
SAFRGDFNNL

SEQ ID NO: 151291 - protein, 10 aa, synthetic construct
SAGRGDFNNL

SEQ ID NO: 151292 - protein, 10 aa, synthetic construct
SAHRGDFNNL

SEQ ID NO: 151293 - protein, 10 aa, synthetic construct
SAIRGDFNNL

SEQ ID NO: 151294 - protein, 10 aa, synthetic construct
SAKRGDFNNL

SEQ ID NO: 151295 - protein, 10 aa, synthetic construct
SALRGDFNNL

SEQ ID NO: 151296 - protein, 10 aa, synthetic construct
SAMRGDFNNL

SEQ ID NO: 151297 - protein, 10 aa, synthetic construct
SAPRGDFNNL

SEQ ID NO: 151298 - protein, 10 aa, synthetic construct
SARRGDFNNL

SEQ ID NO: 151299 - protein, 10 aa, synthetic construct
SAVRGDFNNL

SEQ ID NO: 151300 - protein, 10 aa, synthetic construct
SAWRGDFNNL

SEQ ID NO: 151301 - protein, 10 aa, synthetic construct
SAYRGDFNNL

SEQ ID NO: 151302 - protein, 10 aa, synthetic construct
SDARGDFNNL

SEQ ID NO: 151303 - protein, 10 aa, synthetic construct
SDDRGDFNNL

SEQ ID NO: 151304 - protein, 10 aa, synthetic construct
SDERGDFNNL

SEQ ID NO: 151305 - protein, 10 aa, synthetic construct
SDNRGDFNNL

SEQ ID NO: 151306 - protein, 10 aa, synthetic construct
SDQRGDFNNL

SEQ ID NO: 151307 - protein, 10 aa, synthetic construct
SDSRGDFNNL

SEQ ID NO: 151308 - protein, 10 aa, synthetic construct
SDTRGDFNNL

SEQ ID NO: 151309 - protein, 10 aa, synthetic construct
SDFRGDFNNL

SEQ ID NO: 151310 - protein, 10 aa, synthetic construct
SDGRGDFNNL

SEQ ID NO: 151311 - protein, 10 aa, synthetic construct
SDHRGDFNNL

SEQ ID NO: 151312 - protein, 10 aa, synthetic construct
SDIRGDFNNL

SEQ ID NO: 151313 - protein, 10 aa, synthetic construct
SDKRGDFNNL

SEQ ID NO: 151314 - protein, 10 aa, synthetic construct
SDLRGDFNNL

SEQ ID NO: 151315 - protein, 10 aa, synthetic construct
SDMRGDFNNL

SEQ ID NO: 151316 - protein, 10 aa, synthetic construct
SDPRGDFNNL

SEQ ID NO: 151317 - protein, 10 aa, synthetic construct
SDRRGDFNNL

SEQ ID NO: 151318 - protein, 10 aa, synthetic construct
SDVRGDFNNL

SEQ ID NO: 151319 - protein, 10 aa, synthetic construct
SDWRGDFNNL

SEQ ID NO: 151320 - protein, 10 aa, synthetic construct
SDYRGDFNNL

SEQ ID NO: 151321 - protein, 10 aa, synthetic construct
SEARGDFNNL

SEQ ID NO: 151322 - protein, 10 aa, synthetic construct
SEDRGDFNNL

SEQ ID NO: 151323 - protein, 10 aa, synthetic construct
SEERGDFNNL

SEQ ID NO: 151324 - protein, 10 aa, synthetic construct
SENRGDFNNL

SEQ ID NO: 151325 - protein, 10 aa, synthetic construct
SEQRGDFNNL

SEQ ID NO: 151326 - protein, 10 aa, synthetic construct
SESRGDFNNL

SEQ ID NO: 151327 - protein, 10 aa, synthetic construct
SETRGDFNNL

SEQ ID NO: 151328 - protein, 10 aa, synthetic construct
SEFRGDFNNL

SEQ ID NO: 151329 - protein, 10 aa, synthetic construct
SEGRGDFNNL

SEQ ID NO: 151330 - protein, 10 aa, synthetic construct
SEHRGDFNNL

SEQ ID NO: 151331 - protein, 10 aa, synthetic construct
SEIRGDFNNL

SEQ ID NO: 151332 - protein, 10 aa, synthetic construct
SEKRGDFNNL

SEQ ID NO: 151333 - protein, 10 aa, synthetic construct
SELRGDFNNL

SEQ ID NO: 151334 - protein, 10 aa, synthetic construct
SEMRGDFNNL

SEQ ID NO: 151335 - protein, 10 aa, synthetic construct
SEPRGDFNNL

SEQ ID NO: 151336 - protein, 10 aa, synthetic construct
SERRGDFNNL

SEQ ID NO: 151337 - protein, 10 aa, synthetic construct
SEVRGDFNNL

SEQ ID NO: 151338 - protein, 10 aa, synthetic construct
SEWRGDFNNL

SEQ ID NO: 151339 - protein, 10 aa, synthetic construct
SEYRGDFNNL

SEQ ID NO: 151340 - protein, 10 aa, synthetic construct
SNARGDFNNL

SEQ ID NO: 151341 - protein, 10 aa, synthetic construct
SNDRGDFNNL

SEQ ID NO: 151342 - protein, 10 aa, synthetic construct
SNERGDFNNL

SEQ ID NO: 151343 - protein, 10 aa, synthetic construct
SNNRGDFNNL

SEQ ID NO: 151344 - protein, 10 aa, synthetic construct
SNQRGDFNNL

SEQ ID NO: 151345 - protein, 10 aa, synthetic construct
SNSRGDFNNL

SEQ ID NO: 151346 - protein, 10 aa, synthetic construct
SNTRGDFNNL

SEQ ID NO: 151347 - protein, 10 aa, synthetic construct
SNFRGDFNNL

SEQ ID NO: 151348 - protein, 10 aa, synthetic construct
SNGRGDFNNL

SEQ ID NO: 151349 - protein, 10 aa, synthetic construct
SNHRGDFNNL

SEQ ID NO: 151350 - protein, 10 aa, synthetic construct
SNIRGDFNNL

SEQ ID NO: 151351 - protein, 10 aa, synthetic construct
SNKRGDFNNL

SEQ ID NO: 151352 - protein, 10 aa, synthetic construct
SNLRGDFNNL

SEQ ID NO: 151353 - protein, 10 aa, synthetic construct
SNMRGDFNNL

SEQ ID NO: 151354 - protein, 10 aa, synthetic construct
SNPRGDFNNL

SEQ ID NO: 151355 - protein, 10 aa, synthetic construct
SNRRGDFNNL

SEQ ID NO: 151356 - protein, 10 aa, synthetic construct
SNVRGDFNNL

SEQ ID NO: 151357 - protein, 10 aa, synthetic construct
SNWRGDFNNL

SEQ ID NO: 151358 - protein, 10 aa, synthetic construct
SNYRGDFNNL

SEQ ID NO: 151359 - protein, 10 aa, synthetic construct
SQARGDFNNL

SEQ ID NO: 151360 - protein, 10 aa, synthetic construct
SQDRGDFNNL

SEQ ID NO: 151361 - protein, 10 aa, synthetic construct
SQERGDFNNL

SEQ ID NO: 151362 - protein, 10 aa, synthetic construct
SQNRGDFNNL

SEQ ID NO: 151363 - protein, 10 aa, synthetic construct
SQQRGDFNNL

SEQ ID NO: 151364 - protein, 10 aa, synthetic construct
SQSRGDFNNL

SEQ ID NO: 151365 - protein, 10 aa, synthetic construct
SQTRGDFNNL

SEQ ID NO: 151366 - protein, 10 aa, synthetic construct
SQFRGDFNNL

SEQ ID NO: 151367 - protein, 10 aa, synthetic construct
SQGRGDFNNL

SEQ ID NO: 151368 - protein, 10 aa, synthetic construct
SQHRGDFNNL

SEQ ID NO: 151369 - protein, 10 aa, synthetic construct
SQIRGDFNNL

SEQ ID NO: 151370 - protein, 10 aa, synthetic construct
SQKRGDFNNL

SEQ ID NO: 151371 - protein, 10 aa, synthetic construct
SQLRGDFNNL

SEQ ID NO: 151372 - protein, 10 aa, synthetic construct
SQMRGDFNNL

SEQ ID NO: 151373 - protein, 10 aa, synthetic construct
SQPRGDFNNL

SEQ ID NO: 151374 - protein, 10 aa, synthetic construct
SQRRGDFNNL

SEQ ID NO: 151375 - protein, 10 aa, synthetic construct
SQVRGDFNNL

SEQ ID NO: 151376 - protein, 10 aa, synthetic construct
SQWRGDFNNL

SEQ ID NO: 151377 - protein, 10 aa, synthetic construct
SQYRGDFNNL

SEQ ID NO: 151378 - protein, 10 aa, synthetic construct
SSARGDFNNL

SEQ ID NO: 151379 - protein, 10 aa, synthetic construct
SSDRGDFNNL

SEQ ID NO: 151380 - protein, 10 aa, synthetic construct
SSERGDFNNL

SEQ ID NO: 151381 - protein, 10 aa, synthetic construct
SSNRGDFNNL

SEQ ID NO: 151382 - protein, 10 aa, synthetic construct
SSQRGDFNNL

SEQ ID NO: 151383 - protein, 10 aa, synthetic construct
SSSRGDFNNL

SEQ ID NO: 151384 - protein, 10 aa, synthetic construct
SSTRGDFNNL

SEQ ID NO: 151385 - protein, 10 aa, synthetic construct
SSFRGDFNNL

SEQ ID NO: 151386 - protein, 10 aa, synthetic construct
SSGRGDFNNL

SEQ ID NO: 151387 - protein, 10 aa, synthetic construct
SSHRGDFNNL

SEQ ID NO: 151388 - protein, 10 aa, synthetic construct
SSIRGDFNNL

SEQ ID NO: 151389 - protein, 10 aa, synthetic construct
SSKRGDFNNL

SEQ ID NO: 151390 - protein, 10 aa, synthetic construct
SSLRGDFNNL

SEQ ID NO: 151391 - protein, 10 aa, synthetic construct
SSMRGDFNNL

SEQ ID NO: 151392 - protein, 10 aa, synthetic construct
SSPRGDFNNL

SEQ ID NO: 151393 - protein, 10 aa, synthetic construct
SSRRGDFNNL

SEQ ID NO: 151394 - protein, 10 aa, synthetic construct
SSVRGDFNNL

SEQ ID NO: 151395 - protein, 10 aa, synthetic construct
SSWRGDFNNL

SEQ ID NO: 151396 - protein, 10 aa, synthetic construct
SSYRGDFNNL

SEQ ID NO: 151397 - protein, 10 aa, synthetic construct
STARGDFNNL

SEQ ID NO: 151398 - protein, 10 aa, synthetic construct
STDRGDFNNL

SEQ ID NO: 151399 - protein, 10 aa, synthetic construct
STERGDFNNL

SEQ ID NO: 151400 - protein, 10 aa, synthetic construct
STNRGDFNNL

SEQ ID NO: 151401 - protein, 10 aa, synthetic construct
STQRGDFNNL

SEQ ID NO: 151402 - protein, 10 aa, synthetic construct
STSRGDFNNL

SEQ ID NO: 151403 - protein, 10 aa, synthetic construct
STTRGDFNNL

SEQ ID NO: 151404 - protein, 10 aa, synthetic construct
STFRGDFNNL

SEQ ID NO: 151405 - protein, 10 aa, synthetic construct
STGRGDFNNL

SEQ ID NO: 151406 - protein, 10 aa, synthetic construct
STHRGDFNNL

SEQ ID NO: 151407 - protein, 10 aa, synthetic construct
STIRGDFNNL

SEQ ID NO: 151408 - protein, 10 aa, synthetic construct
STKRGDFNNL

SEQ ID NO: 151409 - protein, 10 aa, synthetic construct
STLRGDFNNL

SEQ ID NO: 151410 - protein, 10 aa, synthetic construct
STMRGDFNNL

SEQ ID NO: 151411 - protein, 10 aa, synthetic construct
STPRGDFNNL

SEQ ID NO: 151412 - protein, 10 aa, synthetic construct
STRRGDFNNL

SEQ ID NO: 151413 - protein, 10 aa, synthetic construct
STVRGDFNNL

SEQ ID NO: 151414 - protein, 10 aa, synthetic construct
STWRGDFNNL

SEQ ID NO: 151415 - protein, 10 aa, synthetic construct
STYRGDFNNL

SEQ ID NO: 151416 - protein, 10 aa, synthetic construct
SFARGDFNNL

SEQ ID NO: 151417 - protein, 10 aa, synthetic construct
SFDRGDFNNL

SEQ ID NO: 151418 - protein, 10 aa, synthetic construct
SFERGDFNNL

SEQ ID NO: 151419 - protein, 10 aa, synthetic construct
SFNRGDFNNL

SEQ ID NO: 151420 - protein, 10 aa, synthetic construct
SFQRGDFNNL

SEQ ID NO: 151421 - protein, 10 aa, synthetic construct
SFSRGDFNNL

SEQ ID NO: 151422 - protein, 10 aa, synthetic construct
SFTRGDFNNL

SEQ ID NO: 151423 - protein, 10 aa, synthetic construct
SFFRGDFNNL

SEQ ID NO: 151424 - protein, 10 aa, synthetic construct
SFGRGDFNNL

SEQ ID NO: 151425 - protein, 10 aa, synthetic construct
SFHRGDFNNL

SEQ ID NO: 151426 - protein, 10 aa, synthetic construct
SFIRGDFNNL

SEQ ID NO: 151427 - protein, 10 aa, synthetic construct
SFKRGDFNNL

SEQ ID NO: 151428 - protein, 10 aa, synthetic construct
SFLRGDFNNL

SEQ ID NO: 151429 - protein, 10 aa, synthetic construct
SFMRGDFNNL

SEQ ID NO: 151430 - protein, 10 aa, synthetic construct
SFPRGDFNNL

SEQ ID NO: 151431 - protein, 10 aa, synthetic construct
SFRRGDFNNL

SEQ ID NO: 151432 - protein, 10 aa, synthetic construct
SFVRGDFNNL

SEQ ID NO: 151433 - protein, 10 aa, synthetic construct
SFWRGDFNNL

SEQ ID NO: 151434 - protein, 10 aa, synthetic construct
SFYRGDFNNL

SEQ ID NO: 151435 - protein, 10 aa, synthetic construct
SGARGDFNNL

SEQ ID NO: 151436 - protein, 10 aa, synthetic construct
SGDRGDFNNL

SEQ ID NO: 151437 - protein, 10 aa, synthetic construct
SGERGDFNNL

SEQ ID NO: 151438 - protein, 10 aa, synthetic construct
SGNRGDFNNL

SEQ ID NO: 151439 - protein, 10 aa, synthetic construct
SGQRGDFNNL

SEQ ID NO: 151440 - protein, 10 aa, synthetic construct
SGSRGDFNNL

SEQ ID NO: 151441 - protein, 10 aa, synthetic construct
SGTRGDFNNL

SEQ ID NO: 151442 - protein, 10 aa, synthetic construct
SGFRGDFNNL

SEQ ID NO: 151443 - protein, 10 aa, synthetic construct
SGGRGDFNNL

SEQ ID NO: 151444 - protein, 10 aa, synthetic construct
SGHRGDFNNL

SEQ ID NO: 151445 - protein, 10 aa, synthetic construct
SGIRGDFNNL

SEQ ID NO: 151446 - protein, 10 aa, synthetic construct
SGKRGDFNNL

SEQ ID NO: 151447 - protein, 10 aa, synthetic construct
SGLRGDFNNL

SEQ ID NO: 151448 - protein, 10 aa, synthetic construct
SGMRGDFNNL

SEQ ID NO: 151449 - protein, 10 aa, synthetic construct
SGPRGDFNNL

SEQ ID NO: 151450 - protein, 10 aa, synthetic construct
SGRRGDFNNL

SEQ ID NO: 151451 - protein, 10 aa, synthetic construct
SGVRGDFNNL

SEQ ID NO: 151452 - protein, 10 aa, synthetic construct
SGWRGDFNNL

SEQ ID NO: 151453 - protein, 10 aa, synthetic construct
SGYRGDFNNL

SEQ ID NO: 151454 - protein, 10 aa, synthetic construct
SHARGDFNNL

SEQ ID NO: 151455 - protein, 10 aa, synthetic construct
SHDRGDFNNL

SEQ ID NO: 151456 - protein, 10 aa, synthetic construct
SHERGDFNNL

SEQ ID NO: 151457 - protein, 10 aa, synthetic construct
SHNRGDFNNL

SEQ ID NO: 151458 - protein, 10 aa, synthetic construct
SHQRGDFNNL

SEQ ID NO: 151459 - protein, 10 aa, synthetic construct
SHSRGDFNNL

SEQ ID NO: 151460 - protein, 10 aa, synthetic construct
SHTRGDFNNL

SEQ ID NO: 151461 - protein, 10 aa, synthetic construct
SHFRGDFNNL

SEQ ID NO: 151462 - protein, 10 aa, synthetic construct
SHGRGDFNNL

SEQ ID NO: 151463 - protein, 10 aa, synthetic construct
SHHRGDFNNL

SEQ ID NO: 151464 - protein, 10 aa, synthetic construct
SHIRGDFNNL

SEQ ID NO: 151465 - protein, 10 aa, synthetic construct
SHKRGDFNNL

SEQ ID NO: 151466 - protein, 10 aa, synthetic construct
SHLRGDFNNL

SEQ ID NO: 151467 - protein, 10 aa, synthetic construct
SHMRGDFNNL

SEQ ID NO: 151468 - protein, 10 aa, synthetic construct
SHPRGDFNNL

SEQ ID NO: 151469 - protein, 10 aa, synthetic construct
SHRRGDFNNL

SEQ ID NO: 151470 - protein, 10 aa, synthetic construct
SHVRGDFNNL

SEQ ID NO: 151471 - protein, 10 aa, synthetic construct
SHWRGDFNNL

SEQ ID NO: 151472 - protein, 10 aa, synthetic construct
SHYRGDFNNL

SEQ ID NO: 151473 - protein, 10 aa, synthetic construct
SIARGDFNNL

SEQ ID NO: 151474 - protein, 10 aa, synthetic construct
SIDRGDFNNL

SEQ ID NO: 151475 - protein, 10 aa, synthetic construct
SIERGDFNNL

SEQ ID NO: 151476 - protein, 10 aa, synthetic construct
SINRGDFNNL

SEQ ID NO: 151477 - protein, 10 aa, synthetic construct
SIQRGDFNNL

SEQ ID NO: 151478 - protein, 10 aa, synthetic construct
SISRGDFNNL

SEQ ID NO: 151479 - protein, 10 aa, synthetic construct
SITRGDFNNL

SEQ ID NO: 151480 - protein, 10 aa, synthetic construct
SIFRGDFNNL

SEQ ID NO: 151481 - protein, 10 aa, synthetic construct
SIGRGDFNNL

SEQ ID NO: 151482 - protein, 10 aa, synthetic construct
SIHRGDFNNL

SEQ ID NO: 151483 - protein, 10 aa, synthetic construct
SIIRGDFNNL

SEQ ID NO: 151484 - protein, 10 aa, synthetic construct
SIKRGDFNNL

SEQ ID NO: 151485 - protein, 10 aa, synthetic construct
SILRGDFNNL

SEQ ID NO: 151486 - protein, 10 aa, synthetic construct
SIMRGDFNNL

SEQ ID NO: 151487 - protein, 10 aa, synthetic construct
SIPRGDFNNL

SEQ ID NO: 151488 - protein, 10 aa, synthetic construct
SIRRGDFNNL

SEQ ID NO: 151489 - protein, 10 aa, synthetic construct
SIVRGDFNNL

SEQ ID NO: 151490 - protein, 10 aa, synthetic construct
SIWRGDFNNL

SEQ ID NO: 151491 - protein, 10 aa, synthetic construct
SIYRGDFNNL

SEQ ID NO: 151492 - protein, 10 aa, synthetic construct
SKARGDFNNL

SEQ ID NO: 151493 - protein, 10 aa, synthetic construct
SKDRGDFNNL

SEQ ID NO: 151494 - protein, 10 aa, synthetic construct
SKERGDFNNL

SEQ ID NO: 151495 - protein, 10 aa, synthetic construct
SKNRGDFNNL

SEQ ID NO: 151496 - protein, 10 aa, synthetic construct
SKQRGDFNNL

SEQ ID NO: 151497 - protein, 10 aa, synthetic construct
SKSRGDFNNL

SEQ ID NO: 151498 - protein, 10 aa, synthetic construct
SKTRGDFNNL

SEQ ID NO: 151499 - protein, 10 aa, synthetic construct
SKFRGDFNNL

SEQ ID NO: 151500 - protein, 10 aa, synthetic construct
SKGRGDFNNL

SEQ ID NO: 151501 - protein, 10 aa, synthetic construct
SKHRGDFNNL

SEQ ID NO: 151502 - protein, 10 aa, synthetic construct
SKIRGDFNNL

SEQ ID NO: 151503 - protein, 10 aa, synthetic construct
SKKRGDFNNL

SEQ ID NO: 151504 - protein, 10 aa, synthetic construct
SKLRGDFNNL

SEQ ID NO: 151505 - protein, 10 aa, synthetic construct
SKMRGDFNNL

SEQ ID NO: 151506 - protein, 10 aa, synthetic construct
SKPRGDFNNL

SEQ ID NO: 151507 - protein, 10 aa, synthetic construct
SKRRGDFNNL

SEQ ID NO: 151508 - protein, 10 aa, synthetic construct
SKVRGDFNNL

SEQ ID NO: 151509 - protein, 10 aa, synthetic construct
SKWRGDFNNL

SEQ ID NO: 151510 - protein, 10 aa, synthetic construct
SKYRGDFNNL

SEQ ID NO: 151511 - protein, 10 aa, synthetic construct
SLARGDFNNL

SEQ ID NO: 151512 - protein, 10 aa, synthetic construct
SLDRGDFNNL

SEQ ID NO: 151513 - protein, 10 aa, synthetic construct
SLERGDFNNL

SEQ ID NO: 151514 - protein, 10 aa, synthetic construct
SLNRGDFNNL

SEQ ID NO: 151515 - protein, 10 aa, synthetic construct
SLQRGDFNNL

SEQ ID NO: 151516 - protein, 10 aa, synthetic construct
SLSRGDFNNL

SEQ ID NO: 151517 - protein, 10 aa, synthetic construct
SLTRGDFNNL

SEQ ID NO: 151518 - protein, 10 aa, synthetic construct
SLFRGDFNNL

SEQ ID NO: 151519 - protein, 10 aa, synthetic construct
SLGRGDFNNL

SEQ ID NO: 151520 - protein, 10 aa, synthetic construct
SLHRGDFNNL

SEQ ID NO: 151521 - protein, 10 aa, synthetic construct
SLIRGDFNNL

SEQ ID NO: 151522 - protein, 10 aa, synthetic construct
SLKRGDFNNL

SEQ ID NO: 151523 - protein, 10 aa, synthetic construct
SLLRGDFNNL

SEQ ID NO: 151524 - protein, 10 aa, synthetic construct
SLMRGDFNNL

SEQ ID NO: 151525 - protein, 10 aa, synthetic construct
SLPRGDFNNL

SEQ ID NO: 151526 - protein, 10 aa, synthetic construct
SLRRGDFNNL

SEQ ID NO: 151527 - protein, 10 aa, synthetic construct
SLVRGDFNNL

SEQ ID NO: 151528 - protein, 10 aa, synthetic construct
SLWRGDFNNL

SEQ ID NO: 151529 - protein, 10 aa, synthetic construct
SLYRGDFNNL

SEQ ID NO: 151530 - protein, 10 aa, synthetic construct
SMARGDFNNL

SEQ ID NO: 151531 - protein, 10 aa, synthetic construct
SMDRGDFNNL

SEQ ID NO: 151532 - protein, 10 aa, synthetic construct
SMERGDFNNL

SEQ ID NO: 151533 - protein, 10 aa, synthetic construct
SMNRGDFNNL

SEQ ID NO: 151534 - protein, 10 aa, synthetic construct
SMQRGDFNNL

SEQ ID NO: 151535 - protein, 10 aa, synthetic construct
SMSRGDFNNL

SEQ ID NO: 151536 - protein, 10 aa, synthetic construct
SMTRGDFNNL

SEQ ID NO: 151537 - protein, 10 aa, synthetic construct
SMFRGDFNNL

SEQ ID NO: 151538 - protein, 10 aa, synthetic construct
SMGRGDFNNL

SEQ ID NO: 151539 - protein, 10 aa, synthetic construct
SMHRGDFNNL

SEQ ID NO: 151540 - protein, 10 aa, synthetic construct
SMIRGDFNNL

SEQ ID NO: 151541 - protein, 10 aa, synthetic construct
SMKRGDFNNL

SEQ ID NO: 151542 - protein, 10 aa, synthetic construct
SMLRGDFNNL

SEQ ID NO: 151543 - protein, 10 aa, synthetic construct
SMMRGDFNNL

SEQ ID NO: 151544 - protein, 10 aa, synthetic construct
SMPRGDFNNL

SEQ ID NO: 151545 - protein, 10 aa, synthetic construct
SMRRGDFNNL

SEQ ID NO: 151546 - protein, 10 aa, synthetic construct
SMVRGDFNNL

SEQ ID NO: 151547 - protein, 10 aa, synthetic construct
SMWRGDFNNL

SEQ ID NO: 151548 - protein, 10 aa, synthetic construct
SMYRGDFNNL

SEQ ID NO: 151549 - protein, 10 aa, synthetic construct
SPARGDFNNL

SEQ ID NO: 151550 - protein, 10 aa, synthetic construct
SPDRGDFNNL

SEQ ID NO: 151551 - protein, 10 aa, synthetic construct
SPERGDFNNL

SEQ ID NO: 151552 - protein, 10 aa, synthetic construct
SPNRGDFNNL

SEQ ID NO: 151553 - protein, 10 aa, synthetic construct
SPQRGDFNNL

SEQ ID NO: 151554 - protein, 10 aa, synthetic construct
SPSRGDFNNL

SEQ ID NO: 151555 - protein, 10 aa, synthetic construct
SPTRGDFNNL

SEQ ID NO: 151556 - protein, 10 aa, synthetic construct
SPFRGDFNNL

SEQ ID NO: 151557 - protein, 10 aa, synthetic construct
SPGRGDFNNL

SEQ ID NO: 151558 - protein, 10 aa, synthetic construct
SPHRGDFNNL

SEQ ID NO: 151559 - protein, 10 aa, synthetic construct
SPIRGDFNNL

SEQ ID NO: 151560 - protein, 10 aa, synthetic construct
SPKRGDFNNL

SEQ ID NO: 151561 - protein, 10 aa, synthetic construct
SPLRGDFNNL

SEQ ID NO: 151562 - protein, 10 aa, synthetic construct
SPMRGDFNNL

SEQ ID NO: 151563 - protein, 10 aa, synthetic construct
SPPRGDFNNL

SEQ ID NO: 151564 - protein, 10 aa, synthetic construct
SPRRGDFNNL

SEQ ID NO: 151565 - protein, 10 aa, synthetic construct
SPVRGDFNNL

SEQ ID NO: 151566 - protein, 10 aa, synthetic construct
SPWRGDFNNL

SEQ ID NO: 151567 - protein, 10 aa, synthetic construct
SPYRGDFNNL

SEQ ID NO: 151568 - protein, 10 aa, synthetic construct
SRARGDFNNL

SEQ ID NO: 151569 - protein, 10 aa, synthetic construct
SRDRGDFNNL

SEQ ID NO: 151570 - protein, 10 aa, synthetic construct
SRERGDFNNL

SEQ ID NO: 151571 - protein, 10 aa, synthetic construct
SRNRGDFNNL

SEQ ID NO: 151572 - protein, 10 aa, synthetic construct
SRQRGDFNNL

SEQ ID NO: 151573 - protein, 10 aa, synthetic construct
SRSRGDFNNL

SEQ ID NO: 151574 - protein, 10 aa, synthetic construct
SRTRGDFNNL

SEQ ID NO: 151575 - protein, 10 aa, synthetic construct
SRFRGDFNNL

SEQ ID NO: 151576 - protein, 10 aa, synthetic construct
SRGRGDFNNL

SEQ ID NO: 151577 - protein, 10 aa, synthetic construct
SRHRGDFNNL

SEQ ID NO: 151578 - protein, 10 aa, synthetic construct
SRIRGDFNNL

SEQ ID NO: 151579 - protein, 10 aa, synthetic construct
SRKRGDFNNL

SEQ ID NO: 151580 - protein, 10 aa, synthetic construct
SRLRGDFNNL

SEQ ID NO: 151581 - protein, 10 aa, synthetic construct
SRMRGDFNNL

SEQ ID NO: 151582 - protein, 10 aa, synthetic construct
SRPRGDFNNL

SEQ ID NO: 151583 - protein, 10 aa, synthetic construct
SRRRGDFNNL

SEQ ID NO: 151584 - protein, 10 aa, synthetic construct
SRVRGDFNNL

SEQ ID NO: 151585 - protein, 10 aa, synthetic construct
SRWRGDFNNL

SEQ ID NO: 151586 - protein, 10 aa, synthetic construct
SRYRGDFNNL

SEQ ID NO: 151587 - protein, 10 aa, synthetic construct
SVARGDFNNL

SEQ ID NO: 151588 - protein, 10 aa, synthetic construct
SVDRGDFNNL

SEQ ID NO: 151589 - protein, 10 aa, synthetic construct
SVERGDFNNL

SEQ ID NO: 151590 - protein, 10 aa, synthetic construct
SVNRGDFNNL

SEQ ID NO: 151591 - protein, 10 aa, synthetic construct
SVQRGDFNNL

SEQ ID NO: 151592 - protein, 10 aa, synthetic construct
SVSRGDFNNL

SEQ ID NO: 151593 - protein, 10 aa, synthetic construct
SVTRGDFNNL

SEQ ID NO: 151594 - protein, 10 aa, synthetic construct
SVFRGDFNNL

SEQ ID NO: 151595 - protein, 10 aa, synthetic construct
SVGRGDFNNL

SEQ ID NO: 151596 - protein, 10 aa, synthetic construct
SVHRGDFNNL

SEQ ID NO: 151597 - protein, 10 aa, synthetic construct
SVIRGDFNNL

SEQ ID NO: 151598 - protein, 10 aa, synthetic construct
SVKRGDFNNL

SEQ ID NO: 151599 - protein, 10 aa, synthetic construct
SVLRGDFNNL

SEQ ID NO: 151600 - protein, 10 aa, synthetic construct
SVMRGDFNNL

SEQ ID NO: 151601 - protein, 10 aa, synthetic construct
SVPRGDFNNL

SEQ ID NO: 151602 - protein, 10 aa, synthetic construct
SVRRGDFNNL

SEQ ID NO: 151603 - protein, 10 aa, synthetic construct
SVVRGDFNNL

SEQ ID NO: 151604 - protein, 10 aa, synthetic construct
SVWRGDFNNL

SEQ ID NO: 151605 - protein, 10 aa, synthetic construct
SVYRGDFNNL

SEQ ID NO: 151606 - protein, 10 aa, synthetic construct
SWARGDFNNL

SEQ ID NO: 151607 - protein, 10 aa, synthetic construct
SWDRGDFNNL

SEQ ID NO: 151608 - protein, 10 aa, synthetic construct
SWERGDFNNL

SEQ ID NO: 151609 - protein, 10 aa, synthetic construct
SWNRGDFNNL

SEQ ID NO: 151610 - protein, 10 aa, synthetic construct
SWQRGDFNNL

SEQ ID NO: 151611 - protein, 10 aa, synthetic construct
SWSRGDFNNL

SEQ ID NO: 151612 - protein, 10 aa, synthetic construct
SWTRGDFNNL

SEQ ID NO: 151613 - protein, 10 aa, synthetic construct
SWFRGDFNNL

SEQ ID NO: 151614 - protein, 10 aa, synthetic construct
SWGRGDFNNL

SEQ ID NO: 151615 - protein, 10 aa, synthetic construct
SWHRGDFNNL

SEQ ID NO: 151616 - protein, 10 aa, synthetic construct
SWIRGDFNNL

SEQ ID NO: 151617 - protein, 10 aa, synthetic construct
SWKRGDFNNL

SEQ ID NO: 151618 - protein, 10 aa, synthetic construct
SWLRGDFNNL

SEQ ID NO: 151619 - protein, 10 aa, synthetic construct
SWMRGDFNNL

SEQ ID NO: 151620 - protein, 10 aa, synthetic construct
SWPRGDFNNL

SEQ ID NO: 151621 - protein, 10 aa, synthetic construct
SWRRGDFNNL

SEQ ID NO: 151622 - protein, 10 aa, synthetic construct
SWVRGDFNNL

SEQ ID NO: 151623 - protein, 10 aa, synthetic construct
SWWRGDFNNL

SEQ ID NO: 151624 - protein, 10 aa, synthetic construct
SWYRGDFNNL

SEQ ID NO: 151625 - protein, 10 aa, synthetic construct
SYARGDFNNL

SEQ ID NO: 151626 - protein, 10 aa, synthetic construct
SYDRGDFNNL

SEQ ID NO: 151627 - protein, 10 aa, synthetic construct
SYERGDFNNL

SEQ ID NO: 151628 - protein, 10 aa, synthetic construct
SYNRGDFNNL

SEQ ID NO: 151629 - protein, 10 aa, synthetic construct
SYQRGDFNNL

SEQ ID NO: 151630 - protein, 10 aa, synthetic construct
SYSRGDFNNL

SEQ ID NO: 151631 - protein, 10 aa, synthetic construct
SYTRGDFNNL

SEQ ID NO: 151632 - protein, 10 aa, synthetic construct
SYFRGDFNNL

SEQ ID NO: 151633 - protein, 10 aa, synthetic construct
SYGRGDFNNL

SEQ ID NO: 151634 - protein, 10 aa, synthetic construct
SYHRGDFNNL

SEQ ID NO: 151635 - protein, 10 aa, synthetic construct
SYIRGDFNNL

SEQ ID NO: 151636 - protein, 10 aa, synthetic construct
SYKRGDFNNL

SEQ ID NO: 151637 - protein, 10 aa, synthetic construct
SYLRGDFNNL

SEQ ID NO: 151638 - protein, 10 aa, synthetic construct
SYMRGDFNNL

SEQ ID NO: 151639 - protein, 10 aa, synthetic construct
SYPRGDFNNL

SEQ ID NO: 151640 - protein, 10 aa, synthetic construct
SYRRGDFNNL

SEQ ID NO: 151641 - protein, 10 aa, synthetic construct
SYVRGDFNNL

SEQ ID NO: 151642 - protein, 10 aa, synthetic construct
SYWRGDFNNL

SEQ ID NO: 151643 - protein, 10 aa, synthetic construct
SYYRGDFNNL

SEQ ID NO: 151644 - protein, 10 aa, synthetic construct
TAARGDFNNL

SEQ ID NO: 151645 - protein, 10 aa, synthetic construct
TADRGDFNNL

SEQ ID NO: 151646 - protein, 10 aa, synthetic construct
TAERGDFNNL

SEQ ID NO: 151647 - protein, 10 aa, synthetic construct
TANRGDFNNL

SEQ ID NO: 151648 - protein, 10 aa, synthetic construct
TAQRGDFNNL

SEQ ID NO: 151649 - protein, 10 aa, synthetic construct
TASRGDFNNL

SEQ ID NO: 151650 - protein, 10 aa, synthetic construct
TATRGDFNNL

SEQ ID NO: 151651 - protein, 10 aa, synthetic construct
TAFRGDFNNL

SEQ ID NO: 151652 - protein, 10 aa, synthetic construct
TAGRGDFNNL

SEQ ID NO: 151653 - protein, 10 aa, synthetic construct
TAHRGDFNNL

SEQ ID NO: 151654 - protein, 10 aa, synthetic construct
TAIRGDFNNL

SEQ ID NO: 151655 - protein, 10 aa, synthetic construct
TAKRGDFNNL

SEQ ID NO: 151656 - protein, 10 aa, synthetic construct
TALRGDFNNL

SEQ ID NO: 151657 - protein, 10 aa, synthetic construct
TAMRGDFNNL

SEQ ID NO: 151658 - protein, 10 aa, synthetic construct
TAPRGDFNNL

SEQ ID NO: 151659 - protein, 10 aa, synthetic construct
TARRGDFNNL

SEQ ID NO: 151660 - protein, 10 aa, synthetic construct
TAVRGDFNNL

SEQ ID NO: 151661 - protein, 10 aa, synthetic construct
TAWRGDFNNL

SEQ ID NO: 151662 - protein, 10 aa, synthetic construct
TAYRGDFNNL

SEQ ID NO: 151663 - protein, 10 aa, synthetic construct
TDARGDFNNL

SEQ ID NO: 151664 - protein, 10 aa, synthetic construct
TDDRGDFNNL

SEQ ID NO: 151665 - protein, 10 aa, synthetic construct
TDERGDFNNL

SEQ ID NO: 151666 - protein, 10 aa, synthetic construct
TDNRGDFNNL

SEQ ID NO: 151667 - protein, 10 aa, synthetic construct
TDQRGDFNNL

SEQ ID NO: 151668 - protein, 10 aa, synthetic construct
TDSRGDFNNL

SEQ ID NO: 151669 - protein, 10 aa, synthetic construct
TDTRGDFNNL

SEQ ID NO: 151670 - protein, 10 aa, synthetic construct
TDFRGDFNNL

SEQ ID NO: 151671 - protein, 10 aa, synthetic construct
TDGRGDFNNL

SEQ ID NO: 151672 - protein, 10 aa, synthetic construct
TDHRGDFNNL

SEQ ID NO: 151673 - protein, 10 aa, synthetic construct
TDIRGDFNNL

SEQ ID NO: 151674 - protein, 10 aa, synthetic construct
TDKRGDFNNL

SEQ ID NO: 151675 - protein, 10 aa, synthetic construct
TDLRGDFNNL

SEQ ID NO: 151676 - protein, 10 aa, synthetic construct
TDMRGDFNNL

SEQ ID NO: 151677 - protein, 10 aa, synthetic construct
TDPRGDFNNL

SEQ ID NO: 151678 - protein, 10 aa, synthetic construct
TDRRGDFNNL

SEQ ID NO: 151679 - protein, 10 aa, synthetic construct
TDVRGDFNNL

SEQ ID NO: 151680 - protein, 10 aa, synthetic construct
TDWRGDFNNL

SEQ ID NO: 151681 - protein, 10 aa, synthetic construct
TDYRGDFNNL

SEQ ID NO: 151682 - protein, 10 aa, synthetic construct
TEARGDFNNL

SEQ ID NO: 151683 - protein, 10 aa, synthetic construct
TEDRGDFNNL

SEQ ID NO: 151684 - protein, 10 aa, synthetic construct
TEERGDFNNL

SEQ ID NO: 151685 - protein, 10 aa, synthetic construct
TENRGDFNNL

SEQ ID NO: 151686 - protein, 10 aa, synthetic construct
TEQRGDFNNL

SEQ ID NO: 151687 - protein, 10 aa, synthetic construct
TESRGDFNNL

SEQ ID NO: 151688 - protein, 10 aa, synthetic construct
TETRGDFNNL

SEQ ID NO: 151689 - protein, 10 aa, synthetic construct
TEFRGDFNNL

SEQ ID NO: 151690 - protein, 10 aa, synthetic construct
TEGRGDFNNL

SEQ ID NO: 151691 - protein, 10 aa, synthetic construct
TEHRGDFNNL

SEQ ID NO: 151692 - protein, 10 aa, synthetic construct
TEIRGDFNNL

SEQ ID NO: 151693 - protein, 10 aa, synthetic construct
TEKRGDFNNL

SEQ ID NO: 151694 - protein, 10 aa, synthetic construct
TELRGDFNNL

SEQ ID NO: 151695 - protein, 10 aa, synthetic construct
TEMRGDFNNL

SEQ ID NO: 151696 - protein, 10 aa, synthetic construct
TEPRGDFNNL

SEQ ID NO: 151697 - protein, 10 aa, synthetic construct
TERRGDFNNL

SEQ ID NO: 151698 - protein, 10 aa, synthetic construct
TEVRGDFNNL

SEQ ID NO: 151699 - protein, 10 aa, synthetic construct
TEWRGDFNNL

SEQ ID NO: 151700 - protein, 10 aa, synthetic construct
TEYRGDFNNL

SEQ ID NO: 151701 - protein, 10 aa, synthetic construct
TNARGDFNNL

SEQ ID NO: 151702 - protein, 10 aa, synthetic construct
TNDRGDFNNL

SEQ ID NO: 151703 - protein, 10 aa, synthetic construct
TNERGDFNNL

SEQ ID NO: 151704 - protein, 10 aa, synthetic construct
TNNRGDFNNL

SEQ ID NO: 151705 - protein, 10 aa, synthetic construct
TNQRGDFNNL

SEQ ID NO: 151706 - protein, 10 aa, synthetic construct
TNSRGDFNNL

SEQ ID NO: 151707 - protein, 10 aa, synthetic construct
TNTRGDFNNL

SEQ ID NO: 151708 - protein, 10 aa, synthetic construct
TNFRGDFNNL

SEQ ID NO: 151709 - protein, 10 aa, synthetic construct
TNGRGDFNNL

SEQ ID NO: 151710 - protein, 10 aa, synthetic construct
TNHRGDFNNL

SEQ ID NO: 151711 - protein, 10 aa, synthetic construct
TNIRGDFNNL

SEQ ID NO: 151712 - protein, 10 aa, synthetic construct
TNKRGDFNNL

SEQ ID NO: 151713 - protein, 10 aa, synthetic construct
TNLRGDFNNL

SEQ ID NO: 151714 - protein, 10 aa, synthetic construct
TNMRGDFNNL

SEQ ID NO: 151715 - protein, 10 aa, synthetic construct
TNPRGDFNNL

SEQ ID NO: 151716 - protein, 10 aa, synthetic construct
TNRRGDFNNL

SEQ ID NO: 151717 - protein, 10 aa, synthetic construct
TNVRGDFNNL

SEQ ID NO: 151718 - protein, 10 aa, synthetic construct
TNWRGDFNNL

SEQ ID NO: 151719 - protein, 10 aa, synthetic construct
TNYRGDFNNL

SEQ ID NO: 151720 - protein, 10 aa, synthetic construct
TQARGDFNNL

SEQ ID NO: 151721 - protein, 10 aa, synthetic construct
TQDRGDFNNL

SEQ ID NO: 151722 - protein, 10 aa, synthetic construct
TQERGDFNNL

SEQ ID NO: 151723 - protein, 10 aa, synthetic construct
TQNRGDFNNL

SEQ ID NO: 151724 - protein, 10 aa, synthetic construct
TQQRGDFNNL

SEQ ID NO: 151725 - protein, 10 aa, synthetic construct
TQSRGDFNNL

SEQ ID NO: 151726 - protein, 10 aa, synthetic construct
TQTRGDFNNL

SEQ ID NO: 151727 - protein, 10 aa, synthetic construct
TQFRGDFNNL

SEQ ID NO: 151728 - protein, 10 aa, synthetic construct
TQGRGDFNNL

SEQ ID NO: 151729 - protein, 10 aa, synthetic construct
TQHRGDFNNL

SEQ ID NO: 151730 - protein, 10 aa, synthetic construct
TQIRGDFNNL

SEQ ID NO: 151731 - protein, 10 aa, synthetic construct
TQKRGDFNNL

SEQ ID NO: 151732 - protein, 10 aa, synthetic construct
TQLRGDFNNL

SEQ ID NO: 151733 - protein, 10 aa, synthetic construct
TQMRGDFNNL

SEQ ID NO: 151734 - protein, 10 aa, synthetic construct
TQPRGDFNNL

SEQ ID NO: 151735 - protein, 10 aa, synthetic construct
TQRRGDFNNL

SEQ ID NO: 151736 - protein, 10 aa, synthetic construct
TQVRGDFNNL

SEQ ID NO: 151737 - protein, 10 aa, synthetic construct
TQWRGDFNNL

SEQ ID NO: 151738 - protein, 10 aa, synthetic construct
TQYRGDFNNL

SEQ ID NO: 151739 - protein, 10 aa, synthetic construct
TSARGDFNNL

SEQ ID NO: 151740 - protein, 10 aa, synthetic construct
TSDRGDFNNL

SEQ ID NO: 151741 - protein, 10 aa, synthetic construct
TSERGDFNNL

SEQ ID NO: 151742 - protein, 10 aa, synthetic construct
TSNRGDFNNL

SEQ ID NO: 151743 - protein, 10 aa, synthetic construct
TSQRGDFNNL

SEQ ID NO: 151744 - protein, 10 aa, synthetic construct
TSSRGDFNNL

SEQ ID NO: 151745 - protein, 10 aa, synthetic construct
TSTRGDFNNL

SEQ ID NO: 151746 - protein, 10 aa, synthetic construct
TSFRGDFNNL

SEQ ID NO: 151747 - protein, 10 aa, synthetic construct
TSGRGDFNNL

SEQ ID NO: 151748 - protein, 10 aa, synthetic construct
TSHRGDFNNL

SEQ ID NO: 151749 - protein, 10 aa, synthetic construct
TSIRGDFNNL

SEQ ID NO: 151750 - protein, 10 aa, synthetic construct
TSKRGDFNNL

SEQ ID NO: 151751 - protein, 10 aa, synthetic construct
TSLRGDFNNL

SEQ ID NO: 151752 - protein, 10 aa, synthetic construct
TSMRGDFNNL

SEQ ID NO: 151753 - protein, 10 aa, synthetic construct
TSPRGDFNNL

SEQ ID NO: 151754 - protein, 10 aa, synthetic construct
TSRRGDFNNL

SEQ ID NO: 151755 - protein, 10 aa, synthetic construct
TSVRGDFNNL

SEQ ID NO: 151756 - protein, 10 aa, synthetic construct
TSWRGDFNNL

SEQ ID NO: 151757 - protein, 10 aa, synthetic construct
TSYRGDFNNL

SEQ ID NO: 151758 - protein, 10 aa, synthetic construct
TTARGDFNNL

SEQ ID NO: 151759 - protein, 10 aa, synthetic construct
TTDRGDFNNL

SEQ ID NO: 151760 - protein, 10 aa, synthetic construct
TTERGDFNNL

SEQ ID NO: 151761 - protein, 10 aa, synthetic construct
TTNRGDFNNL

SEQ ID NO: 151762 - protein, 10 aa, synthetic construct
TTQRGDFNNL

SEQ ID NO: 151763 - protein, 10 aa, synthetic construct
TTSRGDFNNL

SEQ ID NO: 151764 - protein, 10 aa, synthetic construct
TTTRGDFNNL

SEQ ID NO: 151765 - protein, 10 aa, synthetic construct
TTFRGDFNNL

SEQ ID NO: 151766 - protein, 10 aa, synthetic construct
TTGRGDFNNL

SEQ ID NO: 151767 - protein, 10 aa, synthetic construct
TTHRGDFNNL

SEQ ID NO: 151768 - protein, 10 aa, synthetic construct
TTIRGDFNNL

SEQ ID NO: 151769 - protein, 10 aa, synthetic construct
TTKRGDFNNL

SEQ ID NO: 151770 - protein, 10 aa, synthetic construct
TTLRGDFNNL

SEQ ID NO: 151771 - protein, 10 aa, synthetic construct
TTMRGDFNNL

SEQ ID NO: 151772 - protein, 10 aa, synthetic construct
TTPRGDFNNL

SEQ ID NO: 151773 - protein, 10 aa, synthetic construct
TTRRGDFNNL

SEQ ID NO: 151774 - protein, 10 aa, synthetic construct
TTVRGDFNNL

SEQ ID NO: 151775 - protein, 10 aa, synthetic construct
TTWRGDFNNL

SEQ ID NO: 151776 - protein, 10 aa, synthetic construct
TTYRGDFNNL

SEQ ID NO: 151777 - protein, 10 aa, synthetic construct
TFARGDFNNL

SEQ ID NO: 151778 - protein, 10 aa, synthetic construct
TFDRGDFNNL

SEQ ID NO: 151779 - protein, 10 aa, synthetic construct
TFERGDFNNL

SEQ ID NO: 151780 - protein, 10 aa, synthetic construct
TFNRGDFNNL

SEQ ID NO: 151781 - protein, 10 aa, synthetic construct
TFQRGDFNNL

SEQ ID NO: 151782 - protein, 10 aa, synthetic construct
TFSRGDFNNL

SEQ ID NO: 151783 - protein, 10 aa, synthetic construct
TFTRGDFNNL

SEQ ID NO: 151784 - protein, 10 aa, synthetic construct
TFFRGDFNNL

SEQ ID NO: 151785 - protein, 10 aa, synthetic construct
TFGRGDFNNL

SEQ ID NO: 151786 - protein, 10 aa, synthetic construct
TFHRGDFNNL

SEQ ID NO: 151787 - protein, 10 aa, synthetic construct
TFIRGDFNNL

SEQ ID NO: 151788 - protein, 10 aa, synthetic construct
TFKRGDFNNL

SEQ ID NO: 151789 - protein, 10 aa, synthetic construct
TFLRGDFNNL

SEQ ID NO: 151790 - protein, 10 aa, synthetic construct
TFMRGDFNNL

SEQ ID NO: 151791 - protein, 10 aa, synthetic construct
TFPRGDFNNL

SEQ ID NO: 151792 - protein, 10 aa, synthetic construct
TFRRGDFNNL

SEQ ID NO: 151793 - protein, 10 aa, synthetic construct
TFVRGDFNNL

SEQ ID NO: 151794 - protein, 10 aa, synthetic construct
TFWRGDFNNL

SEQ ID NO: 151795 - protein, 10 aa, synthetic construct
TFYRGDFNNL

SEQ ID NO: 151796 - protein, 10 aa, synthetic construct
TGARGDFNNL

SEQ ID NO: 151797 - protein, 10 aa, synthetic construct
TGDRGDFNNL

SEQ ID NO: 151798 - protein, 10 aa, synthetic construct
TGERGDFNNL

SEQ ID NO: 151799 - protein, 10 aa, synthetic construct
TGNRGDFNNL

SEQ ID NO: 151800 - protein, 10 aa, synthetic construct
TGQRGDFNNL

SEQ ID NO: 151801 - protein, 10 aa, synthetic construct
TGSRGDFNNL

SEQ ID NO: 151802 - protein, 10 aa, synthetic construct
TGTRGDFNNL

SEQ ID NO: 151803 - protein, 10 aa, synthetic construct
TGFRGDFNNL

SEQ ID NO: 151804 - protein, 10 aa, synthetic construct
TGGRGDFNNL

SEQ ID NO: 151805 - protein, 10 aa, synthetic construct
TGHRGDFNNL

SEQ ID NO: 151806 - protein, 10 aa, synthetic construct
TGIRGDFNNL

SEQ ID NO: 151807 - protein, 10 aa, synthetic construct
TGKRGDFNNL

SEQ ID NO: 151808 - protein, 10 aa, synthetic construct
TGLRGDFNNL

SEQ ID NO: 151809 - protein, 10 aa, synthetic construct
TGMRGDFNNL

SEQ ID NO: 151810 - protein, 10 aa, synthetic construct
TGPRGDFNNL

SEQ ID NO: 151811 - protein, 10 aa, synthetic construct
TGRRGDFNNL

SEQ ID NO: 151812 - protein, 10 aa, synthetic construct
TGVRGDFNNL

SEQ ID NO: 151813 - protein, 10 aa, synthetic construct
TGWRGDFNNL

SEQ ID NO: 151814 - protein, 10 aa, synthetic construct
TGYRGDFNNL

SEQ ID NO: 151815 - protein, 10 aa, synthetic construct
THARGDFNNL

SEQ ID NO: 151816 - protein, 10 aa, synthetic construct
THDRGDFNNL

SEQ ID NO: 151817 - protein, 10 aa, synthetic construct
THERGDFNNL

SEQ ID NO: 151818 - protein, 10 aa, synthetic construct
THNRGDFNNL

SEQ ID NO: 151819 - protein, 10 aa, synthetic construct
THQRGDFNNL

SEQ ID NO: 151820 - protein, 10 aa, synthetic construct
THSRGDFNNL

SEQ ID NO: 151821 - protein, 10 aa, synthetic construct
THTRGDFNNL

SEQ ID NO: 151822 - protein, 10 aa, synthetic construct
THFRGDFNNL

SEQ ID NO: 151823 - protein, 10 aa, synthetic construct
THGRGDFNNL

SEQ ID NO: 151824 - protein, 10 aa, synthetic construct
THHRGDFNNL

SEQ ID NO: 151825 - protein, 10 aa, synthetic construct
THIRGDFNNL

SEQ ID NO: 151826 - protein, 10 aa, synthetic construct
THKRGDFNNL

SEQ ID NO: 151827 - protein, 10 aa, synthetic construct
THLRGDFNNL

SEQ ID NO: 151828 - protein, 10 aa, synthetic construct
THMRGDFNNL

SEQ ID NO: 151829 - protein, 10 aa, synthetic construct
THPRGDFNNL

SEQ ID NO: 151830 - protein, 10 aa, synthetic construct
THRRGDFNNL

SEQ ID NO: 151831 - protein, 10 aa, synthetic construct
THVRGDFNNL

SEQ ID NO: 151832 - protein, 10 aa, synthetic construct
THWRGDFNNL

SEQ ID NO: 151833 - protein, 10 aa, synthetic construct
THYRGDFNNL

SEQ ID NO: 151834 - protein, 10 aa, synthetic construct
TIARGDFNNL

SEQ ID NO: 151835 - protein, 10 aa, synthetic construct
TIDRGDFNNL

SEQ ID NO: 151836 - protein, 10 aa, synthetic construct
TIERGDFNNL

SEQ ID NO: 151837 - protein, 10 aa, synthetic construct
TINRGDFNNL

SEQ ID NO: 151838 - protein, 10 aa, synthetic construct
TIQRGDFNNL

SEQ ID NO: 151839 - protein, 10 aa, synthetic construct
TISRGDFNNL

SEQ ID NO: 151840 - protein, 10 aa, synthetic construct
TITRGDFNNL

SEQ ID NO: 151841 - protein, 10 aa, synthetic construct
TIFRGDFNNL

SEQ ID NO: 151842 - protein, 10 aa, synthetic construct
TIGRGDFNNL

SEQ ID NO: 151843 - protein, 10 aa, synthetic construct
TIHRGDFNNL

SEQ ID NO: 151844 - protein, 10 aa, synthetic construct
TIIRGDFNNL

SEQ ID NO: 151845 - protein, 10 aa, synthetic construct
TIKRGDFNNL

SEQ ID NO: 151846 - protein, 10 aa, synthetic construct
TILRGDFNNL

SEQ ID NO: 151847 - protein, 10 aa, synthetic construct
TIMRGDFNNL

SEQ ID NO: 151848 - protein, 10 aa, synthetic construct
TIPRGDFNNL

SEQ ID NO: 151849 - protein, 10 aa, synthetic construct
TIRRGDFNNL

SEQ ID NO: 151850 - protein, 10 aa, synthetic construct
TIVRGDFNNL

SEQ ID NO: 151851 - protein, 10 aa, synthetic construct
TIWRGDFNNL

SEQ ID NO: 151852 - protein, 10 aa, synthetic construct
TIYRGDFNNL

SEQ ID NO: 151853 - protein, 10 aa, synthetic construct
TKARGDFNNL

SEQ ID NO: 151854 - protein, 10 aa, synthetic construct
TKDRGDFNNL

SEQ ID NO: 151855 - protein, 10 aa, synthetic construct
TKERGDFNNL

SEQ ID NO: 151856 - protein, 10 aa, synthetic construct
TKNRGDFNNL

SEQ ID NO: 151857 - protein, 10 aa, synthetic construct
TKQRGDFNNL

SEQ ID NO: 151858 - protein, 10 aa, synthetic construct
TKSRGDFNNL

SEQ ID NO: 151859 - protein, 10 aa, synthetic construct
TKTRGDFNNL

SEQ ID NO: 151860 - protein, 10 aa, synthetic construct
TKFRGDFNNL

SEQ ID NO: 151861 - protein, 10 aa, synthetic construct
TKGRGDFNNL

SEQ ID NO: 151862 - protein, 10 aa, synthetic construct
TKHRGDFNNL

SEQ ID NO: 151863 - protein, 10 aa, synthetic construct
TKIRGDFNNL

SEQ ID NO: 151864 - protein, 10 aa, synthetic construct
TKKRGDFNNL

SEQ ID NO: 151865 - protein, 10 aa, synthetic construct
TKLRGDFNNL

SEQ ID NO: 151866 - protein, 10 aa, synthetic construct
TKMRGDFNNL

SEQ ID NO: 151867 - protein, 10 aa, synthetic construct
TKPRGDFNNL

SEQ ID NO: 151868 - protein, 10 aa, synthetic construct
TKRRGDFNNL

SEQ ID NO: 151869 - protein, 10 aa, synthetic construct
TKVRGDFNNL

SEQ ID NO: 151870 - protein, 10 aa, synthetic construct
TKWRGDFNNL

SEQ ID NO: 151871 - protein, 10 aa, synthetic construct
TKYRGDFNNL

SEQ ID NO: 151872 - protein, 10 aa, synthetic construct
TLARGDFNNL

SEQ ID NO: 151873 - protein, 10 aa, synthetic construct
TLDRGDFNNL

SEQ ID NO: 151874 - protein, 10 aa, synthetic construct
TLERGDFNNL

SEQ ID NO: 151875 - protein, 10 aa, synthetic construct
TLNRGDFNNL

SEQ ID NO: 151876 - protein, 10 aa, synthetic construct
TLQRGDFNNL

SEQ ID NO: 151877 - protein, 10 aa, synthetic construct
TLSRGDFNNL

SEQ ID NO: 151878 - protein, 10 aa, synthetic construct
TLTRGDFNNL

SEQ ID NO: 151879 - protein, 10 aa, synthetic construct
TLFRGDFNNL

SEQ ID NO: 151880 - protein, 10 aa, synthetic construct
TLGRGDFNNL

SEQ ID NO: 151881 - protein, 10 aa, synthetic construct
TLHRGDFNNL

SEQ ID NO: 151882 - protein, 10 aa, synthetic construct
TLIRGDFNNL

SEQ ID NO: 151883 - protein, 10 aa, synthetic construct
TLKRGDFNNL

SEQ ID NO: 151884 - protein, 10 aa, synthetic construct
TLLRGDFNNL

SEQ ID NO: 151885 - protein, 10 aa, synthetic construct
TLMRGDFNNL

SEQ ID NO: 151886 - protein, 10 aa, synthetic construct
TLPRGDFNNL

SEQ ID NO: 151887 - protein, 10 aa, synthetic construct
TLRRGDFNNL

SEQ ID NO: 151888 - protein, 10 aa, synthetic construct
TLVRGDFNNL

SEQ ID NO: 151889 - protein, 10 aa, synthetic construct
TLWRGDFNNL

SEQ ID NO: 151890 - protein, 10 aa, synthetic construct
TLYRGDFNNL

SEQ ID NO: 151891 - protein, 10 aa, synthetic construct
TMARGDFNNL

SEQ ID NO: 151892 - protein, 10 aa, synthetic construct
TMDRGDFNNL

SEQ ID NO: 151893 - protein, 10 aa, synthetic construct
TMERGDFNNL

SEQ ID NO: 151894 - protein, 10 aa, synthetic construct
TMNRGDFNNL

SEQ ID NO: 151895 - protein, 10 aa, synthetic construct
TMQRGDFNNL

SEQ ID NO: 151896 - protein, 10 aa, synthetic construct
TMSRGDFNNL

SEQ ID NO: 151897 - protein, 10 aa, synthetic construct
TMTRGDFNNL

SEQ ID NO: 151898 - protein, 10 aa, synthetic construct
TMFRGDFNNL

SEQ ID NO: 151899 - protein, 10 aa, synthetic construct
TMGRGDFNNL

SEQ ID NO: 151900 - protein, 10 aa, synthetic construct
TMHRGDFNNL

SEQ ID NO: 151901 - protein, 10 aa, synthetic construct
TMIRGDFNNL

SEQ ID NO: 151902 - protein, 10 aa, synthetic construct
TMKRGDFNNL

SEQ ID NO: 151903 - protein, 10 aa, synthetic construct
TMLRGDFNNL

SEQ ID NO: 151904 - protein, 10 aa, synthetic construct
TMMRGDFNNL

SEQ ID NO: 151905 - protein, 10 aa, synthetic construct
TMPRGDFNNL

SEQ ID NO: 151906 - protein, 10 aa, synthetic construct
TMRRGDFNNL

SEQ ID NO: 151907 - protein, 10 aa, synthetic construct
TMVRGDFNNL

SEQ ID NO: 151908 - protein, 10 aa, synthetic construct
TMWRGDFNNL

SEQ ID NO: 151909 - protein, 10 aa, synthetic construct
TMYRGDFNNL

SEQ ID NO: 151910 - protein, 10 aa, synthetic construct
TPARGDFNNL

SEQ ID NO: 151911 - protein, 10 aa, synthetic construct
TPDRGDFNNL

SEQ ID NO: 151912 - protein, 10 aa, synthetic construct
TPERGDFNNL

SEQ ID NO: 151913 - protein, 10 aa, synthetic construct
TPNRGDFNNL

SEQ ID NO: 151914 - protein, 10 aa, synthetic construct
TPQRGDFNNL

SEQ ID NO: 151915 - protein, 10 aa, synthetic construct
TPSRGDFNNL

SEQ ID NO: 151916 - protein, 10 aa, synthetic construct
TPTRGDFNNL

SEQ ID NO: 151917 - protein, 10 aa, synthetic construct
TPFRGDFNNL

SEQ ID NO: 151918 - protein, 10 aa, synthetic construct
TPGRGDFNNL

SEQ ID NO: 151919 - protein, 10 aa, synthetic construct
TPHRGDFNNL

SEQ ID NO: 151920 - protein, 10 aa, synthetic construct
TPIRGDFNNL

SEQ ID NO: 151921 - protein, 10 aa, synthetic construct
TPKRGDFNNL

SEQ ID NO: 151922 - protein, 10 aa, synthetic construct
TPLRGDFNNL

SEQ ID NO: 151923 - protein, 10 aa, synthetic construct
TPMRGDFNNL

SEQ ID NO: 151924 - protein, 10 aa, synthetic construct
TPPRGDFNNL

SEQ ID NO: 151925 - protein, 10 aa, synthetic construct
TPRRGDFNNL

SEQ ID NO: 151926 - protein, 10 aa, synthetic construct
TPVRGDFNNL

SEQ ID NO: 151927 - protein, 10 aa, synthetic construct
TPWRGDFNNL

SEQ ID NO: 151928 - protein, 10 aa, synthetic construct
TPYRGDFNNL

SEQ ID NO: 151929 - protein, 10 aa, synthetic construct
TRARGDFNNL

SEQ ID NO: 151930 - protein, 10 aa, synthetic construct
TRDRGDFNNL

SEQ ID NO: 151931 - protein, 10 aa, synthetic construct
TRERGDFNNL

SEQ ID NO: 151932 - protein, 10 aa, synthetic construct
TRNRGDFNNL

SEQ ID NO: 151933 - protein, 10 aa, synthetic construct
TRQRGDFNNL

SEQ ID NO: 151934 - protein, 10 aa, synthetic construct
TRSRGDFNNL

SEQ ID NO: 151935 - protein, 10 aa, synthetic construct
TRTRGDFNNL

SEQ ID NO: 151936 - protein, 10 aa, synthetic construct
TRFRGDFNNL

SEQ ID NO: 151937 - protein, 10 aa, synthetic construct
TRGRGDFNNL

SEQ ID NO: 151938 - protein, 10 aa, synthetic construct
TRHRGDFNNL

SEQ ID NO: 151939 - protein, 10 aa, synthetic construct
TRIRGDFNNL

SEQ ID NO: 151940 - protein, 10 aa, synthetic construct
TRKRGDFNNL

SEQ ID NO: 151941 - protein, 10 aa, synthetic construct
TRLRGDFNNL

SEQ ID NO: 151942 - protein, 10 aa, synthetic construct
TRMRGDFNNL

SEQ ID NO: 151943 - protein, 10 aa, synthetic construct
TRPRGDFNNL

SEQ ID NO: 151944 - protein, 10 aa, synthetic construct
TRRRGDFNNL

SEQ ID NO: 151945 - protein, 10 aa, synthetic construct
TRVRGDFNNL

SEQ ID NO: 151946 - protein, 10 aa, synthetic construct
TRWRGDFNNL

SEQ ID NO: 151947 - protein, 10 aa, synthetic construct
TRYRGDFNNL

SEQ ID NO: 151948 - protein, 10 aa, synthetic construct
TVARGDFNNL

SEQ ID NO: 151949 - protein, 10 aa, synthetic construct
TVDRGDFNNL

SEQ ID NO: 151950 - protein, 10 aa, synthetic construct
TVERGDFNNL

SEQ ID NO: 151951 - protein, 10 aa, synthetic construct
TVNRGDFNNL

SEQ ID NO: 151952 - protein, 10 aa, synthetic construct
TVQRGDFNNL

SEQ ID NO: 151953 - protein, 10 aa, synthetic construct
TVSRGDFNNL

SEQ ID NO: 151954 - protein, 10 aa, synthetic construct
TVTRGDFNNL

SEQ ID NO: 151955 - protein, 10 aa, synthetic construct
TVFRGDFNNL

SEQ ID NO: 151956 - protein, 10 aa, synthetic construct
TVGRGDFNNL

SEQ ID NO: 151957 - protein, 10 aa, synthetic construct
TVHRGDFNNL

SEQ ID NO: 151958 - protein, 10 aa, synthetic construct
TVIRGDFNNL

SEQ ID NO: 151959 - protein, 10 aa, synthetic construct
TVKRGDFNNL

SEQ ID NO: 151960 - protein, 10 aa, synthetic construct
TVLRGDFNNL

SEQ ID NO: 151961 - protein, 10 aa, synthetic construct
TVMRGDFNNL

SEQ ID NO: 151962 - protein, 10 aa, synthetic construct
TVPRGDFNNL

SEQ ID NO: 151963 - protein, 10 aa, synthetic construct
TVRRGDFNNL

SEQ ID NO: 151964 - protein, 10 aa, synthetic construct
TVVRGDFNNL

SEQ ID NO: 151965 - protein, 10 aa, synthetic construct
TVWRGDFNNL

SEQ ID NO: 151966 - protein, 10 aa, synthetic construct
TVYRGDFNNL

SEQ ID NO: 151967 - protein, 10 aa, synthetic construct
TWARGDFNNL

SEQ ID NO: 151968 - protein, 10 aa, synthetic construct
TWDRGDFNNL

SEQ ID NO: 151969 - protein, 10 aa, synthetic construct
TWERGDFNNL

SEQ ID NO: 151970 - protein, 10 aa, synthetic construct
TWNRGDFNNL

SEQ ID NO: 151971 - protein, 10 aa, synthetic construct
TWQRGDFNNL

SEQ ID NO: 151972 - protein, 10 aa, synthetic construct
TWSRGDFNNL

SEQ ID NO: 151973 - protein, 10 aa, synthetic construct
TWTRGDFNNL

SEQ ID NO: 151974 - protein, 10 aa, synthetic construct
TWFRGDFNNL

SEQ ID NO: 151975 - protein, 10 aa, synthetic construct
TWGRGDFNNL

SEQ ID NO: 151976 - protein, 10 aa, synthetic construct
TWHRGDFNNL

SEQ ID NO: 151977 - protein, 10 aa, synthetic construct
TWIRGDFNNL

SEQ ID NO: 151978 - protein, 10 aa, synthetic construct
TWKRGDFNNL

SEQ ID NO: 151979 - protein, 10 aa, synthetic construct
TWLRGDFNNL

SEQ ID NO: 151980 - protein, 10 aa, synthetic construct
TWMRGDFNNL

SEQ ID NO: 151981 - protein, 10 aa, synthetic construct
TWPRGDFNNL

SEQ ID NO: 151982 - protein, 10 aa, synthetic construct
TWRRGDFNNL

SEQ ID NO: 151983 - protein, 10 aa, synthetic construct
TWVRGDFNNL

SEQ ID NO: 151984 - protein, 10 aa, synthetic construct
TWWRGDFNNL

SEQ ID NO: 151985 - protein, 10 aa, synthetic construct
TWYRGDFNNL

SEQ ID NO: 151986 - protein, 10 aa, synthetic construct
TYARGDFNNL

SEQ ID NO: 151987 - protein, 10 aa, synthetic construct
TYDRGDFNNL

SEQ ID NO: 151988 - protein, 10 aa, synthetic construct
TYERGDFNNL

SEQ ID NO: 151989 - protein, 10 aa, synthetic construct
TYNRGDFNNL

SEQ ID NO: 151990 - protein, 10 aa, synthetic construct
TYQRGDFNNL

SEQ ID NO: 151991 - protein, 10 aa, synthetic construct
TYSRGDFNNL

SEQ ID NO: 151992 - protein, 10 aa, synthetic construct
TYTRGDFNNL

SEQ ID NO: 151993 - protein, 10 aa, synthetic construct
TYFRGDFNNL

SEQ ID NO: 151994 - protein, 10 aa, synthetic construct
TYGRGDFNNL

SEQ ID NO: 151995 - protein, 10 aa, synthetic construct
TYHRGDFNNL

SEQ ID NO: 151996 - protein, 10 aa, synthetic construct
TYIRGDFNNL

SEQ ID NO: 151997 - protein, 10 aa, synthetic construct
TYKRGDFNNL

SEQ ID NO: 151998 - protein, 10 aa, synthetic construct
TYLRGDFNNL

SEQ ID NO: 151999 - protein, 10 aa, synthetic construct
TYMRGDFNNL

SEQ ID NO: 152000 - protein, 10 aa, synthetic construct
TYPRGDFNNL

SEQ ID NO: 152001 - protein, 10 aa, synthetic construct
TYRRGDFNNL

SEQ ID NO: 152002 - protein, 10 aa, synthetic construct
TYVRGDFNNL

SEQ ID NO: 152003 - protein, 10 aa, synthetic construct
TYWRGDFNNL

SEQ ID NO: 152004 - protein, 10 aa, synthetic construct
TYYRGDFNNL

SEQ ID NO: 152005 - protein, 10 aa, synthetic construct
AAARGDFNNL

SEQ ID NO: 152006 - protein, 10 aa, synthetic construct
AADRGDFNNL

SEQ ID NO: 152007 - protein, 10 aa, synthetic construct
AAERGDFNNL

SEQ ID NO: 152008 - protein, 10 aa, synthetic construct
AANRGDFNNL

SEQ ID NO: 152009 - protein, 10 aa, synthetic construct
AAQRGDFNNL

SEQ ID NO: 152010 - protein, 10 aa, synthetic construct
AASRGDFNNL

SEQ ID NO: 152011 - protein, 10 aa, synthetic construct
AATRGDFNNL

SEQ ID NO: 152012 - protein, 10 aa, synthetic construct
AAFRGDFNNL

SEQ ID NO: 152013 - protein, 10 aa, synthetic construct
AAGRGDFNNL

SEQ ID NO: 152014 - protein, 10 aa, synthetic construct
AAHRGDFNNL

SEQ ID NO: 152015 - protein, 10 aa, synthetic construct
AAIRGDFNNL

SEQ ID NO: 152016 - protein, 10 aa, synthetic construct
AAKRGDFNNL

SEQ ID NO: 152017 - protein, 10 aa, synthetic construct
AALRGDFNNL

SEQ ID NO: 152018 - protein, 10 aa, synthetic construct
AAMRGDFNNL

SEQ ID NO: 152019 - protein, 10 aa, synthetic construct
AAPRGDFNNL

SEQ ID NO: 152020 - protein, 10 aa, synthetic construct
AARRGDFNNL

SEQ ID NO: 152021 - protein, 10 aa, synthetic construct
AAVRGDFNNL

SEQ ID NO: 152022 - protein, 10 aa, synthetic construct
AAWRGDFNNL

SEQ ID NO: 152023 - protein, 10 aa, synthetic construct
AAYRGDFNNL

SEQ ID NO: 152024 - protein, 10 aa, synthetic construct
ADARGDFNNL

SEQ ID NO: 152025 - protein, 10 aa, synthetic construct
ADDRGDFNNL

SEQ ID NO: 152026 - protein, 10 aa, synthetic construct
ADERGDFNNL

SEQ ID NO: 152027 - protein, 10 aa, synthetic construct
ADNRGDFNNL

SEQ ID NO: 152028 - protein, 10 aa, synthetic construct
ADQRGDFNNL

SEQ ID NO: 152029 - protein, 10 aa, synthetic construct
ADSRGDFNNL

SEQ ID NO: 152030 - protein, 10 aa, synthetic construct
ADTRGDFNNL

SEQ ID NO: 152031 - protein, 10 aa, synthetic construct
ADFRGDFNNL

SEQ ID NO: 152032 - protein, 10 aa, synthetic construct
ADGRGDFNNL

SEQ ID NO: 152033 - protein, 10 aa, synthetic construct
ADHRGDFNNL

SEQ ID NO: 152034 - protein, 10 aa, synthetic construct
ADIRGDFNNL

SEQ ID NO: 152035 - protein, 10 aa, synthetic construct
ADKRGDFNNL

SEQ ID NO: 152036 - protein, 10 aa, synthetic construct
ADLRGDFNNL

SEQ ID NO: 152037 - protein, 10 aa, synthetic construct
ADMRGDFNNL

SEQ ID NO: 152038 - protein, 10 aa, synthetic construct
ADPRGDFNNL

SEQ ID NO: 152039 - protein, 10 aa, synthetic construct
ADRRGDFNNL

SEQ ID NO: 152040 - protein, 10 aa, synthetic construct
ADVRGDFNNL

SEQ ID NO: 152041 - protein, 10 aa, synthetic construct
ADWRGDFNNL

SEQ ID NO: 152042 - protein, 10 aa, synthetic construct
ADYRGDFNNL

SEQ ID NO: 152043 - protein, 10 aa, synthetic construct
AEARGDFNNL

SEQ ID NO: 152044 - protein, 10 aa, synthetic construct
AEDRGDFNNL

SEQ ID NO: 152045 - protein, 10 aa, synthetic construct
AEERGDFNNL

SEQ ID NO: 152046 - protein, 10 aa, synthetic construct
AENRGDFNNL

SEQ ID NO: 152047 - protein, 10 aa, synthetic construct
AEQRGDFNNL

SEQ ID NO: 152048 - protein, 10 aa, synthetic construct
AESRGDFNNL

SEQ ID NO: 152049 - protein, 10 aa, synthetic construct
AETRGDFNNL

SEQ ID NO: 152050 - protein, 10 aa, synthetic construct
AEFRGDFNNL

SEQ ID NO: 152051 - protein, 10 aa, synthetic construct
AEGRGDFNNL

SEQ ID NO: 152052 - protein, 10 aa, synthetic construct
AEHRGDFNNL

SEQ ID NO: 152053 - protein, 10 aa, synthetic construct
AEIRGDFNNL

SEQ ID NO: 152054 - protein, 10 aa, synthetic construct
AEKRGDFNNL

SEQ ID NO: 152055 - protein, 10 aa, synthetic construct
AELRGDFNNL

SEQ ID NO: 152056 - protein, 10 aa, synthetic construct
AEMRGDFNNL

SEQ ID NO: 152057 - protein, 10 aa, synthetic construct
AEPRGDFNNL

SEQ ID NO: 152058 - protein, 10 aa, synthetic construct
AERRGDFNNL

SEQ ID NO: 152059 - protein, 10 aa, synthetic construct
AEVRGDFNNL

SEQ ID NO: 152060 - protein, 10 aa, synthetic construct
AEWRGDFNNL

SEQ ID NO: 152061 - protein, 10 aa, synthetic construct
AEYRGDFNNL

SEQ ID NO: 152062 - protein, 10 aa, synthetic construct
ANARGDFNNL

SEQ ID NO: 152063 - protein, 10 aa, synthetic construct
ANDRGDFNNL

SEQ ID NO: 152064 - protein, 10 aa, synthetic construct
ANERGDFNNL

SEQ ID NO: 152065 - protein, 10 aa, synthetic construct
ANNRGDFNNL

SEQ ID NO: 152066 - protein, 10 aa, synthetic construct
ANQRGDFNNL

SEQ ID NO: 152067 - protein, 10 aa, synthetic construct
ANSRGDFNNL

SEQ ID NO: 152068 - protein, 10 aa, synthetic construct
ANTRGDFNNL

SEQ ID NO: 152069 - protein, 10 aa, synthetic construct
ANFRGDFNNL

SEQ ID NO: 152070 - protein, 10 aa, synthetic construct
ANGRGDFNNL

SEQ ID NO: 152071 - protein, 10 aa, synthetic construct
ANHRGDFNNL

SEQ ID NO: 152072 - protein, 10 aa, synthetic construct
ANIRGDFNNL

SEQ ID NO: 152073 - protein, 10 aa, synthetic construct
ANKRGDFNNL

SEQ ID NO: 152074 - protein, 10 aa, synthetic construct
ANLRGDFNNL

SEQ ID NO: 152075 - protein, 10 aa, synthetic construct
ANMRGDFNNL

SEQ ID NO: 152076 - protein, 10 aa, synthetic construct
ANPRGDFNNL

SEQ ID NO: 152077 - protein, 10 aa, synthetic construct
ANRRGDFNNL

SEQ ID NO: 152078 - protein, 10 aa, synthetic construct
ANVRGDFNNL

SEQ ID NO: 152079 - protein, 10 aa, synthetic construct
ANWRGDFNNL

SEQ ID NO: 152080 - protein, 10 aa, synthetic construct
ANYRGDFNNL

SEQ ID NO: 152081 - protein, 10 aa, synthetic construct
AQARGDFNNL

SEQ ID NO: 152082 - protein, 10 aa, synthetic construct
AQDRGDFNNL

SEQ ID NO: 152083 - protein, 10 aa, synthetic construct
AQERGDFNNL

SEQ ID NO: 152084 - protein, 10 aa, synthetic construct
AQNRGDFNNL

SEQ ID NO: 152085 - protein, 10 aa, synthetic construct
AQQRGDFNNL

SEQ ID NO: 152086 - protein, 10 aa, synthetic construct
AQSRGDFNNL

SEQ ID NO: 152087 - protein, 10 aa, synthetic construct
AQTRGDFNNL

SEQ ID NO: 152088 - protein, 10 aa, synthetic construct
AQFRGDFNNL

SEQ ID NO: 152089 - protein, 10 aa, synthetic construct
AQGRGDFNNL

SEQ ID NO: 152090 - protein, 10 aa, synthetic construct
AQHRGDFNNL

SEQ ID NO: 152091 - protein, 10 aa, synthetic construct
AQIRGDFNNL

SEQ ID NO: 152092 - protein, 10 aa, synthetic construct
AQKRGDFNNL

SEQ ID NO: 152093 - protein, 10 aa, synthetic construct
AQLRGDFNNL

SEQ ID NO: 152094 - protein, 10 aa, synthetic construct
AQMRGDFNNL

SEQ ID NO: 152095 - protein, 10 aa, synthetic construct
AQPRGDFNNL

SEQ ID NO: 152096 - protein, 10 aa, synthetic construct
AQRRGDFNNL

SEQ ID NO: 152097 - protein, 10 aa, synthetic construct
AQVRGDFNNL

SEQ ID NO: 152098 - protein, 10 aa, synthetic construct
AQWRGDFNNL

SEQ ID NO: 152099 - protein, 10 aa, synthetic construct
AQYRGDFNNL

SEQ ID NO: 152100 - protein, 10 aa, synthetic construct
ASARGDFNNL

SEQ ID NO: 152101 - protein, 10 aa, synthetic construct
ASDRGDFNNL

SEQ ID NO: 152102 - protein, 10 aa, synthetic construct
ASERGDFNNL

SEQ ID NO: 152103 - protein, 10 aa, synthetic construct
ASNRGDFNNL

SEQ ID NO: 152104 - protein, 10 aa, synthetic construct
ASQRGDFNNL

SEQ ID NO: 152105 - protein, 10 aa, synthetic construct
ASSRGDFNNL

SEQ ID NO: 152106 - protein, 10 aa, synthetic construct
ASTRGDFNNL

SEQ ID NO: 152107 - protein, 10 aa, synthetic construct
ASFRGDFNNL

SEQ ID NO: 152108 - protein, 10 aa, synthetic construct
ASGRGDFNNL

SEQ ID NO: 152109 - protein, 10 aa, synthetic construct
ASHRGDFNNL

SEQ ID NO: 152110 - protein, 10 aa, synthetic construct
ASIRGDFNNL

SEQ ID NO: 152111 - protein, 10 aa, synthetic construct
ASKRGDFNNL

SEQ ID NO: 152112 - protein, 10 aa, synthetic construct
ASLRGDFNNL

SEQ ID NO: 152113 - protein, 10 aa, synthetic construct
ASMRGDFNNL

SEQ ID NO: 152114 - protein, 10 aa, synthetic construct
ASPRGDFNNL

SEQ ID NO: 152115 - protein, 10 aa, synthetic construct
ASRRGDFNNL

SEQ ID NO: 152116 - protein, 10 aa, synthetic construct
ASVRGDFNNL

SEQ ID NO: 152117 - protein, 10 aa, synthetic construct
ASWRGDFNNL

SEQ ID NO: 152118 - protein, 10 aa, synthetic construct
ASYRGDFNNL

SEQ ID NO: 152119 - protein, 10 aa, synthetic construct
ATARGDFNNL

SEQ ID NO: 152120 - protein, 10 aa, synthetic construct
ATDRGDFNNL

SEQ ID NO: 152121 - protein, 10 aa, synthetic construct
ATERGDFNNL

SEQ ID NO: 152122 - protein, 10 aa, synthetic construct
ATNRGDFNNL

SEQ ID NO: 152123 - protein, 10 aa, synthetic construct
ATQRGDFNNL

SEQ ID NO: 152124 - protein, 10 aa, synthetic construct
ATSRGDFNNL

SEQ ID NO: 152125 - protein, 10 aa, synthetic construct
ATTRGDFNNL

SEQ ID NO: 152126 - protein, 10 aa, synthetic construct
ATFRGDFNNL

SEQ ID NO: 152127 - protein, 10 aa, synthetic construct
ATGRGDFNNL

SEQ ID NO: 152128 - protein, 10 aa, synthetic construct
ATHRGDFNNL

SEQ ID NO: 152129 - protein, 10 aa, synthetic construct
ATIRGDFNNL

SEQ ID NO: 152130 - protein, 10 aa, synthetic construct
ATKRGDFNNL

SEQ ID NO: 152131 - protein, 10 aa, synthetic construct
ATLRGDFNNL

SEQ ID NO: 152132 - protein, 10 aa, synthetic construct
ATMRGDFNNL

SEQ ID NO: 152133 - protein, 10 aa, synthetic construct
ATPRGDFNNL

SEQ ID NO: 152134 - protein, 10 aa, synthetic construct
ATRRGDFNNL

SEQ ID NO: 152135 - protein, 10 aa, synthetic construct
ATVRGDFNNL

SEQ ID NO: 152136 - protein, 10 aa, synthetic construct
ATWRGDFNNL

SEQ ID NO: 152137 - protein, 10 aa, synthetic construct
ATYRGDFNNL

SEQ ID NO: 152138 - protein, 10 aa, synthetic construct
AFARGDFNNL

SEQ ID NO: 152139 - protein, 10 aa, synthetic construct
AFDRGDFNNL

SEQ ID NO: 152140 - protein, 10 aa, synthetic construct
AFERGDFNNL

SEQ ID NO: 152141 - protein, 10 aa, synthetic construct
AFNRGDFNNL

SEQ ID NO: 152142 - protein, 10 aa, synthetic construct
AFQRGDFNNL

SEQ ID NO: 152143 - protein, 10 aa, synthetic construct
AFSRGDFNNL

SEQ ID NO: 152144 - protein, 10 aa, synthetic construct
AFTRGDFNNL

SEQ ID NO: 152145 - protein, 10 aa, synthetic construct
AFFRGDFNNL

SEQ ID NO: 152146 - protein, 10 aa, synthetic construct
AFGRGDFNNL

SEQ ID NO: 152147 - protein, 10 aa, synthetic construct
AFHRGDFNNL

SEQ ID NO: 152148 - protein, 10 aa, synthetic construct
AFIRGDFNNL

SEQ ID NO: 152149 - protein, 10 aa, synthetic construct
AFKRGDFNNL

SEQ ID NO: 152150 - protein, 10 aa, synthetic construct
AFLRGDFNNL

SEQ ID NO: 152151 - protein, 10 aa, synthetic construct
AFMRGDFNNL

SEQ ID NO: 152152 - protein, 10 aa, synthetic construct
AFPRGDFNNL

SEQ ID NO: 152153 - protein, 10 aa, synthetic construct
AFRRGDFNNL

SEQ ID NO: 152154 - protein, 10 aa, synthetic construct
AFVRGDFNNL

SEQ ID NO: 152155 - protein, 10 aa, synthetic construct
AFWRGDFNNL

SEQ ID NO: 152156 - protein, 10 aa, synthetic construct
AFYRGDFNNL

SEQ ID NO: 152157 - protein, 10 aa, synthetic construct
AGARGDFNNL

SEQ ID NO: 152158 - protein, 10 aa, synthetic construct
AGDRGDFNNL

SEQ ID NO: 152159 - protein, 10 aa, synthetic construct
AGERGDFNNL

SEQ ID NO: 152160 - protein, 10 aa, synthetic construct
AGNRGDFNNL

SEQ ID NO: 152161 - protein, 10 aa, synthetic construct
AGQRGDFNNL

SEQ ID NO: 152162 - protein, 10 aa, synthetic construct
AGSRGDFNNL

SEQ ID NO: 152163 - protein, 10 aa, synthetic construct
AGTRGDFNNL

SEQ ID NO: 152164 - protein, 10 aa, synthetic construct
AGFRGDFNNL

SEQ ID NO: 152165 - protein, 10 aa, synthetic construct
AGGRGDFNNL

SEQ ID NO: 152166 - protein, 10 aa, synthetic construct
AGHRGDFNNL

SEQ ID NO: 152167 - protein, 10 aa, synthetic construct
AGIRGDFNNL

SEQ ID NO: 152168 - protein, 10 aa, synthetic construct
AGKRGDFNNL

SEQ ID NO: 152169 - protein, 10 aa, synthetic construct
AGLRGDFNNL

SEQ ID NO: 152170 - protein, 10 aa, synthetic construct
AGMRGDFNNL

SEQ ID NO: 152171 - protein, 10 aa, synthetic construct
AGPRGDFNNL

SEQ ID NO: 152172 - protein, 10 aa, synthetic construct
AGRRGDFNNL

SEQ ID NO: 152173 - protein, 10 aa, synthetic construct
AGVRGDFNNL

SEQ ID NO: 152174 - protein, 10 aa, synthetic construct
AGWRGDFNNL

SEQ ID NO: 152175 - protein, 10 aa, synthetic construct
AGYRGDFNNL

SEQ ID NO: 152176 - protein, 10 aa, synthetic construct
AHARGDFNNL

SEQ ID NO: 152177 - protein, 10 aa, synthetic construct
AHDRGDFNNL

SEQ ID NO: 152178 - protein, 10 aa, synthetic construct
AHERGDFNNL

SEQ ID NO: 152179 - protein, 10 aa, synthetic construct
AHNRGDFNNL

SEQ ID NO: 152180 - protein, 10 aa, synthetic construct
AHQRGDFNNL

SEQ ID NO: 152181 - protein, 10 aa, synthetic construct
AHSRGDFNNL

SEQ ID NO: 152182 - protein, 10 aa, synthetic construct
AHTRGDFNNL

SEQ ID NO: 152183 - protein, 10 aa, synthetic construct
AHFRGDFNNL

SEQ ID NO: 152184 - protein, 10 aa, synthetic construct
AHGRGDFNNL

SEQ ID NO: 152185 - protein, 10 aa, synthetic construct
AHHRGDFNNL

SEQ ID NO: 152186 - protein, 10 aa, synthetic construct
AHIRGDFNNL

SEQ ID NO: 152187 - protein, 10 aa, synthetic construct
AHKRGDFNNL

SEQ ID NO: 152188 - protein, 10 aa, synthetic construct
AHLRGDFNNL

SEQ ID NO: 152189 - protein, 10 aa, synthetic construct
AHMRGDFNNL

SEQ ID NO: 152190 - protein, 10 aa, synthetic construct
AHPRGDFNNL

SEQ ID NO: 152191 - protein, 10 aa, synthetic construct
AHRRGDFNNL

SEQ ID NO: 152192 - protein, 10 aa, synthetic construct
AHVRGDFNNL

SEQ ID NO: 152193 - protein, 10 aa, synthetic construct
AHWRGDFNNL

SEQ ID NO: 152194 - protein, 10 aa, synthetic construct
AHYRGDFNNL

SEQ ID NO: 152195 - protein, 10 aa, synthetic construct
AIARGDFNNL

SEQ ID NO: 152196 - protein, 10 aa, synthetic construct
AIDRGDFNNL

SEQ ID NO: 152197 - protein, 10 aa, synthetic construct
AIERGDFNNL

SEQ ID NO: 152198 - protein, 10 aa, synthetic construct
AINRGDFNNL

SEQ ID NO: 152199 - protein, 10 aa, synthetic construct
AIQRGDFNNL

SEQ ID NO: 152200 - protein, 10 aa, synthetic construct
AISRGDFNNL

SEQ ID NO: 152201 - protein, 10 aa, synthetic construct
AITRGDFNNL

SEQ ID NO: 152202 - protein, 10 aa, synthetic construct
AIFRGDFNNL

SEQ ID NO: 152203 - protein, 10 aa, synthetic construct
AIGRGDFNNL

SEQ ID NO: 152204 - protein, 10 aa, synthetic construct
AIHRGDFNNL

SEQ ID NO: 152205 - protein, 10 aa, synthetic construct
AIIRGDFNNL

SEQ ID NO: 152206 - protein, 10 aa, synthetic construct
AIKRGDFNNL

SEQ ID NO: 152207 - protein, 10 aa, synthetic construct
AILRGDFNNL

SEQ ID NO: 152208 - protein, 10 aa, synthetic construct
AIMRGDFNNL

SEQ ID NO: 152209 - protein, 10 aa, synthetic construct
AIPRGDFNNL

SEQ ID NO: 152210 - protein, 10 aa, synthetic construct
AIRRGDFNNL

SEQ ID NO: 152211 - protein, 10 aa, synthetic construct
AIVRGDFNNL

SEQ ID NO: 152212 - protein, 10 aa, synthetic construct
AIWRGDFNNL

SEQ ID NO: 152213 - protein, 10 aa, synthetic construct
AIYRGDFNNL

SEQ ID NO: 152214 - protein, 10 aa, synthetic construct
AKARGDFNNL

SEQ ID NO: 152215 - protein, 10 aa, synthetic construct
AKDRGDFNNL

SEQ ID NO: 152216 - protein, 10 aa, synthetic construct
AKERGDFNNL

SEQ ID NO: 152217 - protein, 10 aa, synthetic construct
AKNRGDFNNL

SEQ ID NO: 152218 - protein, 10 aa, synthetic construct
AKQRGDFNNL

SEQ ID NO: 152219 - protein, 10 aa, synthetic construct
AKSRGDFNNL

SEQ ID NO: 152220 - protein, 10 aa, synthetic construct
AKTRGDFNNL

SEQ ID NO: 152221 - protein, 10 aa, synthetic construct
AKFRGDFNNL

SEQ ID NO: 152222 - protein, 10 aa, synthetic construct
AKGRGDFNNL

SEQ ID NO: 152223 - protein, 10 aa, synthetic construct
AKHRGDFNNL

SEQ ID NO: 152224 - protein, 10 aa, synthetic construct
AKIRGDFNNL

SEQ ID NO: 152225 - protein, 10 aa, synthetic construct
AKKRGDFNNL

SEQ ID NO: 152226 - protein, 10 aa, synthetic construct
AKLRGDFNNL

SEQ ID NO: 152227 - protein, 10 aa, synthetic construct
AKMRGDFNNL

SEQ ID NO: 152228 - protein, 10 aa, synthetic construct
AKPRGDFNNL

SEQ ID NO: 152229 - protein, 10 aa, synthetic construct
AKRRGDFNNL

SEQ ID NO: 152230 - protein, 10 aa, synthetic construct
AKVRGDFNNL

SEQ ID NO: 152231 - protein, 10 aa, synthetic construct
AKWRGDFNNL

SEQ ID NO: 152232 - protein, 10 aa, synthetic construct
AKYRGDFNNL

SEQ ID NO: 152233 - protein, 10 aa, synthetic construct
ALARGDFNNL

SEQ ID NO: 152234 - protein, 10 aa, synthetic construct
ALDRGDFNNL

SEQ ID NO: 152235 - protein, 10 aa, synthetic construct
ALERGDFNNL

SEQ ID NO: 152236 - protein, 10 aa, synthetic construct
ALNRGDFNNL

SEQ ID NO: 152237 - protein, 10 aa, synthetic construct
ALQRGDFNNL

SEQ ID NO: 152238 - protein, 10 aa, synthetic construct
ALSRGDFNNL

SEQ ID NO: 152239 - protein, 10 aa, synthetic construct
ALTRGDFNNL

SEQ ID NO: 152240 - protein, 10 aa, synthetic construct
ALFRGDFNNL

SEQ ID NO: 152241 - protein, 10 aa, synthetic construct
ALGRGDFNNL

SEQ ID NO: 152242 - protein, 10 aa, synthetic construct
ALHRGDFNNL

SEQ ID NO: 152243 - protein, 10 aa, synthetic construct
ALIRGDFNNL

SEQ ID NO: 152244 - protein, 10 aa, synthetic construct
ALKRGDFNNL

SEQ ID NO: 152245 - protein, 10 aa, synthetic construct
ALLRGDFNNL

SEQ ID NO: 152246 - protein, 10 aa, synthetic construct
ALMRGDFNNL

SEQ ID NO: 152247 - protein, 10 aa, synthetic construct
ALPRGDFNNL

SEQ ID NO: 152248 - protein, 10 aa, synthetic construct
ALRRGDFNNL

SEQ ID NO: 152249 - protein, 10 aa, synthetic construct
ALVRGDFNNL

SEQ ID NO: 152250 - protein, 10 aa, synthetic construct
ALWRGDFNNL

SEQ ID NO: 152251 - protein, 10 aa, synthetic construct
ALYRGDFNNL

SEQ ID NO: 152252 - protein, 10 aa, synthetic construct
AMARGDFNNL

SEQ ID NO: 152253 - protein, 10 aa, synthetic construct
AMDRGDFNNL

SEQ ID NO: 152254 - protein, 10 aa, synthetic construct
AMERGDFNNL

SEQ ID NO: 152255 - protein, 10 aa, synthetic construct
AMNRGDFNNL

SEQ ID NO: 152256 - protein, 10 aa, synthetic construct
AMQRGDFNNL

SEQ ID NO: 152257 - protein, 10 aa, synthetic construct
AMSRGDFNNL

SEQ ID NO: 152258 - protein, 10 aa, synthetic construct
AMTRGDFNNL

SEQ ID NO: 152259 - protein, 10 aa, synthetic construct
AMFRGDFNNL

SEQ ID NO: 152260 - protein, 10 aa, synthetic construct
AMGRGDFNNL

SEQ ID NO: 152261 - protein, 10 aa, synthetic construct
AMHRGDFNNL

SEQ ID NO: 152262 - protein, 10 aa, synthetic construct
AMIRGDFNNL

SEQ ID NO: 152263 - protein, 10 aa, synthetic construct
AMKRGDFNNL

SEQ ID NO: 152264 - protein, 10 aa, synthetic construct
AMLRGDFNNL

SEQ ID NO: 152265 - protein, 10 aa, synthetic construct
AMMRGDFNNL

SEQ ID NO: 152266 - protein, 10 aa, synthetic construct
AMPRGDFNNL

SEQ ID NO: 152267 - protein, 10 aa, synthetic construct
AMRRGDFNNL

SEQ ID NO: 152268 - protein, 10 aa, synthetic construct
AMVRGDFNNL

SEQ ID NO: 152269 - protein, 10 aa, synthetic construct
AMWRGDFNNL

SEQ ID NO: 152270 - protein, 10 aa, synthetic construct
AMYRGDFNNL

SEQ ID NO: 152271 - protein, 10 aa, synthetic construct
APARGDFNNL

SEQ ID NO: 152272 - protein, 10 aa, synthetic construct
APDRGDFNNL

SEQ ID NO: 152273 - protein, 10 aa, synthetic construct
APERGDFNNL

SEQ ID NO: 152274 - protein, 10 aa, synthetic construct
APNRGDFNNL

SEQ ID NO: 152275 - protein, 10 aa, synthetic construct
APQRGDFNNL

SEQ ID NO: 152276 - protein, 10 aa, synthetic construct
APSRGDFNNL

SEQ ID NO: 152277 - protein, 10 aa, synthetic construct
APTRGDFNNL

SEQ ID NO: 152278 - protein, 10 aa, synthetic construct
APFRGDFNNL

SEQ ID NO: 152279 - protein, 10 aa, synthetic construct
APGRGDFNNL

SEQ ID NO: 152280 - protein, 10 aa, synthetic construct
APHRGDFNNL

SEQ ID NO: 152281 - protein, 10 aa, synthetic construct
APIRGDFNNL

SEQ ID NO: 152282 - protein, 10 aa, synthetic construct
APKRGDFNNL

SEQ ID NO: 152283 - protein, 10 aa, synthetic construct
APLRGDFNNL

SEQ ID NO: 152284 - protein, 10 aa, synthetic construct
APMRGDFNNL

SEQ ID NO: 152285 - protein, 10 aa, synthetic construct
APPRGDFNNL

SEQ ID NO: 152286 - protein, 10 aa, synthetic construct
APRRGDFNNL

SEQ ID NO: 152287 - protein, 10 aa, synthetic construct
APVRGDFNNL

SEQ ID NO: 152288 - protein, 10 aa, synthetic construct
APWRGDFNNL

SEQ ID NO: 152289 - protein, 10 aa, synthetic construct
APYRGDFNNL

SEQ ID NO: 152290 - protein, 10 aa, synthetic construct
ARARGDFNNL

SEQ ID NO: 152291 - protein, 10 aa, synthetic construct
ARDRGDFNNL

SEQ ID NO: 152292 - protein, 10 aa, synthetic construct
ARERGDFNNL

SEQ ID NO: 152293 - protein, 10 aa, synthetic construct
ARNRGDFNNL

SEQ ID NO: 152294 - protein, 10 aa, synthetic construct
ARQRGDFNNL

SEQ ID NO: 152295 - protein, 10 aa, synthetic construct
ARSRGDFNNL

SEQ ID NO: 152296 - protein, 10 aa, synthetic construct
ARTRGDFNNL

SEQ ID NO: 152297 - protein, 10 aa, synthetic construct
ARFRGDFNNL

SEQ ID NO: 152298 - protein, 10 aa, synthetic construct
ARGRGDFNNL

SEQ ID NO: 152299 - protein, 10 aa, synthetic construct
ARHRGDFNNL

SEQ ID NO: 152300 - protein, 10 aa, synthetic construct
ARIRGDFNNL

SEQ ID NO: 152301 - protein, 10 aa, synthetic construct
ARKRGDFNNL

SEQ ID NO: 152302 - protein, 10 aa, synthetic construct
ARLRGDFNNL

SEQ ID NO: 152303 - protein, 10 aa, synthetic construct
ARMRGDFNNL

SEQ ID NO: 152304 - protein, 10 aa, synthetic construct
ARPRGDFNNL

SEQ ID NO: 152305 - protein, 10 aa, synthetic construct
ARRRGDFNNL

SEQ ID NO: 152306 - protein, 10 aa, synthetic construct
ARVRGDFNNL

SEQ ID NO: 152307 - protein, 10 aa, synthetic construct
ARWRGDFNNL

SEQ ID NO: 152308 - protein, 10 aa, synthetic construct
ARYRGDFNNL

SEQ ID NO: 152309 - protein, 10 aa, synthetic construct
AVARGDFNNL

SEQ ID NO: 152310 - protein, 10 aa, synthetic construct
AVDRGDFNNL

SEQ ID NO: 152311 - protein, 10 aa, synthetic construct
AVERGDFNNL

SEQ ID NO: 152312 - protein, 10 aa, synthetic construct
AVNRGDFNNL

SEQ ID NO: 152313 - protein, 10 aa, synthetic construct
AVQRGDFNNL

SEQ ID NO: 152314 - protein, 10 aa, synthetic construct
AVSRGDFNNL

SEQ ID NO: 152315 - protein, 10 aa, synthetic construct
AVTRGDFNNL

SEQ ID NO: 152316 - protein, 10 aa, synthetic construct
AVFRGDFNNL

SEQ ID NO: 152317 - protein, 10 aa, synthetic construct
AVGRGDFNNL

SEQ ID NO: 152318 - protein, 10 aa, synthetic construct
AVHRGDFNNL

SEQ ID NO: 152319 - protein, 10 aa, synthetic construct
AVIRGDFNNL

SEQ ID NO: 152320 - protein, 10 aa, synthetic construct
AVKRGDFNNL

SEQ ID NO: 152321 - protein, 10 aa, synthetic construct
AVLRGDFNNL

SEQ ID NO: 152322 - protein, 10 aa, synthetic construct
AVMRGDFNNL

SEQ ID NO: 152323 - protein, 10 aa, synthetic construct
AVPRGDFNNL

SEQ ID NO: 152324 - protein, 10 aa, synthetic construct
AVRRGDFNNL

SEQ ID NO: 152325 - protein, 10 aa, synthetic construct
AVVRGDFNNL

SEQ ID NO: 152326 - protein, 10 aa, synthetic construct
AVWRGDFNNL

SEQ ID NO: 152327 - protein, 10 aa, synthetic construct
AVYRGDFNNL

SEQ ID NO: 152328 - protein, 10 aa, synthetic construct
AWARGDFNNL

SEQ ID NO: 152329 - protein, 10 aa, synthetic construct
AWDRGDFNNL

SEQ ID NO: 152330 - protein, 10 aa, synthetic construct
AWERGDFNNL

SEQ ID NO: 152331 - protein, 10 aa, synthetic construct
AWNRGDFNNL

SEQ ID NO: 152332 - protein, 10 aa, synthetic construct
AWQRGDFNNL

SEQ ID NO: 152333 - protein, 10 aa, synthetic construct
AWSRGDFNNL

SEQ ID NO: 152334 - protein, 10 aa, synthetic construct
AWTRGDFNNL

SEQ ID NO: 152335 - protein, 10 aa, synthetic construct
AWFRGDFNNL

SEQ ID NO: 152336 - protein, 10 aa, synthetic construct
AWGRGDFNNL

SEQ ID NO: 152337 - protein, 10 aa, synthetic construct
AWHRGDFNNL

SEQ ID NO: 152338 - protein, 10 aa, synthetic construct
AWIRGDFNNL

SEQ ID NO: 152339 - protein, 10 aa, synthetic construct
AWKRGDFNNL

SEQ ID NO: 152340 - protein, 10 aa, synthetic construct
AWLRGDFNNL

SEQ ID NO: 152341 - protein, 10 aa, synthetic construct
AWMRGDFNNL

SEQ ID NO: 152342 - protein, 10 aa, synthetic construct
AWPRGDFNNL

SEQ ID NO: 152343 - protein, 10 aa, synthetic construct
AWRRGDFNNL

SEQ ID NO: 152344 - protein, 10 aa, synthetic construct
AWVRGDFNNL

SEQ ID NO: 152345 - protein, 10 aa, synthetic construct
AWWRGDFNNL

SEQ ID NO: 152346 - protein, 10 aa, synthetic construct
AWYRGDFNNL

SEQ ID NO: 152347 - protein, 10 aa, synthetic construct
AYARGDFNNL

SEQ ID NO: 152348 - protein, 10 aa, synthetic construct
AYDRGDFNNL

SEQ ID NO: 152349 - protein, 10 aa, synthetic construct
AYERGDFNNL

SEQ ID NO: 152350 - protein, 10 aa, synthetic construct
AYNRGDFNNL

SEQ ID NO: 152351 - protein, 10 aa, synthetic construct
AYQRGDFNNL

SEQ ID NO: 152352 - protein, 10 aa, synthetic construct
AYSRGDFNNL

SEQ ID NO: 152353 - protein, 10 aa, synthetic construct
AYTRGDFNNL

SEQ ID NO: 152354 - protein, 10 aa, synthetic construct
AYFRGDFNNL

SEQ ID NO: 152355 - protein, 10 aa, synthetic construct
AYGRGDFNNL

SEQ ID NO: 152356 - protein, 10 aa, synthetic construct
AYHRGDFNNL

SEQ ID NO: 152357 - protein, 10 aa, synthetic construct
AYIRGDFNNL

SEQ ID NO: 152358 - protein, 10 aa, synthetic construct
AYKRGDFNNL

SEQ ID NO: 152359 - protein, 10 aa, synthetic construct
AYLRGDFNNL

SEQ ID NO: 152360 - protein, 10 aa, synthetic construct
AYMRGDFNNL

SEQ ID NO: 152361 - protein, 10 aa, synthetic construct
AYPRGDFNNL

SEQ ID NO: 152362 - protein, 10 aa, synthetic construct
AYRRGDFNNL

SEQ ID NO: 152363 - protein, 10 aa, synthetic construct
AYVRGDFNNL

SEQ ID NO: 152364 - protein, 10 aa, synthetic construct
AYWRGDFNNL

SEQ ID NO: 152365 - protein, 10 aa, synthetic construct
AYYRGDFNNL

SEQ ID NO: 152366 - protein, 10 aa, synthetic construct
DAARGDFNNL

SEQ ID NO: 152367 - protein, 10 aa, synthetic construct
DADRGDFNNL

SEQ ID NO: 152368 - protein, 10 aa, synthetic construct
DAERGDFNNL

SEQ ID NO: 152369 - protein, 10 aa, synthetic construct
DANRGDFNNL

SEQ ID NO: 152370 - protein, 10 aa, synthetic construct
DAQRGDFNNL

SEQ ID NO: 152371 - protein, 10 aa, synthetic construct
DASRGDFNNL

SEQ ID NO: 152372 - protein, 10 aa, synthetic construct
DATRGDFNNL

SEQ ID NO: 152373 - protein, 10 aa, synthetic construct
DAFRGDFNNL

SEQ ID NO: 152374 - protein, 10 aa, synthetic construct
DAGRGDFNNL

SEQ ID NO: 152375 - protein, 10 aa, synthetic construct
DAHRGDFNNL

SEQ ID NO: 152376 - protein, 10 aa, synthetic construct
DAIRGDFNNL

SEQ ID NO: 152377 - protein, 10 aa, synthetic construct
DAKRGDFNNL

SEQ ID NO: 152378 - protein, 10 aa, synthetic construct
DALRGDFNNL

SEQ ID NO: 152379 - protein, 10 aa, synthetic construct
DAMRGDFNNL

SEQ ID NO: 152380 - protein, 10 aa, synthetic construct
DAPRGDFNNL

SEQ ID NO: 152381 - protein, 10 aa, synthetic construct
DARRGDFNNL

SEQ ID NO: 152382 - protein, 10 aa, synthetic construct
DAVRGDFNNL

SEQ ID NO: 152383 - protein, 10 aa, synthetic construct
DAWRGDFNNL

SEQ ID NO: 152384 - protein, 10 aa, synthetic construct
DAYRGDFNNL

SEQ ID NO: 152385 - protein, 10 aa, synthetic construct
DDARGDFNNL

SEQ ID NO: 152386 - protein, 10 aa, synthetic construct
DDDRGDFNNL

SEQ ID NO: 152387 - protein, 10 aa, synthetic construct
DDERGDFNNL

SEQ ID NO: 152388 - protein, 10 aa, synthetic construct
DDNRGDFNNL

SEQ ID NO: 152389 - protein, 10 aa, synthetic construct
DDQRGDFNNL

SEQ ID NO: 152390 - protein, 10 aa, synthetic construct
DDSRGDFNNL

SEQ ID NO: 152391 - protein, 10 aa, synthetic construct
DDTRGDFNNL

SEQ ID NO: 152392 - protein, 10 aa, synthetic construct
DDFRGDFNNL

SEQ ID NO: 152393 - protein, 10 aa, synthetic construct
DDGRGDFNNL

SEQ ID NO: 152394 - protein, 10 aa, synthetic construct
DDHRGDFNNL

SEQ ID NO: 152395 - protein, 10 aa, synthetic construct
DDIRGDFNNL

SEQ ID NO: 152396 - protein, 10 aa, synthetic construct
DDKRGDFNNL

SEQ ID NO: 152397 - protein, 10 aa, synthetic construct
DDLRGDFNNL

SEQ ID NO: 152398 - protein, 10 aa, synthetic construct
DDMRGDFNNL

SEQ ID NO: 152399 - protein, 10 aa, synthetic construct
DDPRGDFNNL

SEQ ID NO: 152400 - protein, 10 aa, synthetic construct
DDRRGDFNNL

SEQ ID NO: 152401 - protein, 10 aa, synthetic construct
DDVRGDFNNL

SEQ ID NO: 152402 - protein, 10 aa, synthetic construct
DDWRGDFNNL

SEQ ID NO: 152403 - protein, 10 aa, synthetic construct
DDYRGDFNNL

SEQ ID NO: 152404 - protein, 10 aa, synthetic construct
DEARGDFNNL

SEQ ID NO: 152405 - protein, 10 aa, synthetic construct
DEDRGDFNNL

SEQ ID NO: 152406 - protein, 10 aa, synthetic construct
DEERGDFNNL

SEQ ID NO: 152407 - protein, 10 aa, synthetic construct
DENRGDFNNL

SEQ ID NO: 152408 - protein, 10 aa, synthetic construct
DEQRGDFNNL

SEQ ID NO: 152409 - protein, 10 aa, synthetic construct
DESRGDFNNL

SEQ ID NO: 152410 - protein, 10 aa, synthetic construct
DETRGDFNNL

SEQ ID NO: 152411 - protein, 10 aa, synthetic construct
DEFRGDFNNL

SEQ ID NO: 152412 - protein, 10 aa, synthetic construct
DEGRGDFNNL

SEQ ID NO: 152413 - protein, 10 aa, synthetic construct
DEHRGDFNNL

SEQ ID NO: 152414 - protein, 10 aa, synthetic construct
DEIRGDFNNL

SEQ ID NO: 152415 - protein, 10 aa, synthetic construct
DEKRGDFNNL

SEQ ID NO: 152416 - protein, 10 aa, synthetic construct
DELRGDFNNL

SEQ ID NO: 152417 - protein, 10 aa, synthetic construct
DEMRGDFNNL

SEQ ID NO: 152418 - protein, 10 aa, synthetic construct
DEPRGDFNNL

SEQ ID NO: 152419 - protein, 10 aa, synthetic construct
DERRGDFNNL

SEQ ID NO: 152420 - protein, 10 aa, synthetic construct
DEVRGDFNNL

SEQ ID NO: 152421 - protein, 10 aa, synthetic construct
DEWRGDFNNL

SEQ ID NO: 152422 - protein, 10 aa, synthetic construct
DEYRGDFNNL

SEQ ID NO: 152423 - protein, 10 aa, synthetic construct
DNARGDFNNL

SEQ ID NO: 152424 - protein, 10 aa, synthetic construct
DNDRGDFNNL

SEQ ID NO: 152425 - protein, 10 aa, synthetic construct
DNERGDFNNL

SEQ ID NO: 152426 - protein, 10 aa, synthetic construct
DNNRGDFNNL

SEQ ID NO: 152427 - protein, 10 aa, synthetic construct
DNQRGDFNNL

SEQ ID NO: 152428 - protein, 10 aa, synthetic construct
DNSRGDFNNL

SEQ ID NO: 152429 - protein, 10 aa, synthetic construct
DNTRGDFNNL

SEQ ID NO: 152430 - protein, 10 aa, synthetic construct
DNFRGDFNNL

SEQ ID NO: 152431 - protein, 10 aa, synthetic construct
DNGRGDFNNL

SEQ ID NO: 152432 - protein, 10 aa, synthetic construct
DNHRGDFNNL

SEQ ID NO: 152433 - protein, 10 aa, synthetic construct
DNIRGDFNNL

SEQ ID NO: 152434 - protein, 10 aa, synthetic construct
DNKRGDFNNL

SEQ ID NO: 152435 - protein, 10 aa, synthetic construct
DNLRGDFNNL

SEQ ID NO: 152436 - protein, 10 aa, synthetic construct
DNMRGDFNNL

SEQ ID NO: 152437 - protein, 10 aa, synthetic construct
DNPRGDFNNL

SEQ ID NO: 152438 - protein, 10 aa, synthetic construct
DNRRGDFNNL

SEQ ID NO: 152439 - protein, 10 aa, synthetic construct
DNVRGDFNNL

SEQ ID NO: 152440 - protein, 10 aa, synthetic construct
DNWRGDFNNL

SEQ ID NO: 152441 - protein, 10 aa, synthetic construct
DNYRGDFNNL

SEQ ID NO: 152442 - protein, 10 aa, synthetic construct
DQARGDFNNL

SEQ ID NO: 152443 - protein, 10 aa, synthetic construct
DQDRGDFNNL

SEQ ID NO: 152444 - protein, 10 aa, synthetic construct
DQERGDFNNL

SEQ ID NO: 152445 - protein, 10 aa, synthetic construct
DQNRGDFNNL

SEQ ID NO: 152446 - protein, 10 aa, synthetic construct
DQQRGDFNNL

SEQ ID NO: 152447 - protein, 10 aa, synthetic construct
DQSRGDFNNL

SEQ ID NO: 152448 - protein, 10 aa, synthetic construct
DQTRGDFNNL

SEQ ID NO: 152449 - protein, 10 aa, synthetic construct
DQFRGDFNNL

SEQ ID NO: 152450 - protein, 10 aa, synthetic construct
DQGRGDFNNL

SEQ ID NO: 152451 - protein, 10 aa, synthetic construct
DQHRGDFNNL

SEQ ID NO: 152452 - protein, 10 aa, synthetic construct
DQIRGDFNNL

SEQ ID NO: 152453 - protein, 10 aa, synthetic construct
DQKRGDFNNL

SEQ ID NO: 152454 - protein, 10 aa, synthetic construct
DQLRGDFNNL

SEQ ID NO: 152455 - protein, 10 aa, synthetic construct
DQMRGDFNNL

SEQ ID NO: 152456 - protein, 10 aa, synthetic construct
DQPRGDFNNL

SEQ ID NO: 152457 - protein, 10 aa, synthetic construct
DQRRGDFNNL

SEQ ID NO: 152458 - protein, 10 aa, synthetic construct
DQVRGDFNNL

SEQ ID NO: 152459 - protein, 10 aa, synthetic construct
DQWRGDFNNL

SEQ ID NO: 152460 - protein, 10 aa, synthetic construct
DQYRGDFNNL

SEQ ID NO: 152461 - protein, 10 aa, synthetic construct
DSARGDFNNL

SEQ ID NO: 152462 - protein, 10 aa, synthetic construct
DSDRGDFNNL

SEQ ID NO: 152463 - protein, 10 aa, synthetic construct
DSERGDFNNL

SEQ ID NO: 152464 - protein, 10 aa, synthetic construct
DSNRGDFNNL

SEQ ID NO: 152465 - protein, 10 aa, synthetic construct
DSQRGDFNNL

SEQ ID NO: 152466 - protein, 10 aa, synthetic construct
DSSRGDFNNL

SEQ ID NO: 152467 - protein, 10 aa, synthetic construct
DSTRGDFNNL

SEQ ID NO: 152468 - protein, 10 aa, synthetic construct
DSFRGDFNNL

SEQ ID NO: 152469 - protein, 10 aa, synthetic construct
DSGRGDFNNL

SEQ ID NO: 152470 - protein, 10 aa, synthetic construct
DSHRGDFNNL

SEQ ID NO: 152471 - protein, 10 aa, synthetic construct
DSIRGDFNNL

SEQ ID NO: 152472 - protein, 10 aa, synthetic construct
DSKRGDFNNL

SEQ ID NO: 152473 - protein, 10 aa, synthetic construct
DSLRGDFNNL

SEQ ID NO: 152474 - protein, 10 aa, synthetic construct
DSMRGDFNNL

SEQ ID NO: 152475 - protein, 10 aa, synthetic construct
DSPRGDFNNL

SEQ ID NO: 152476 - protein, 10 aa, synthetic construct
DSRRGDFNNL

SEQ ID NO: 152477 - protein, 10 aa, synthetic construct
DSVRGDFNNL

SEQ ID NO: 152478 - protein, 10 aa, synthetic construct
DSWRGDFNNL

SEQ ID NO: 152479 - protein, 10 aa, synthetic construct
DSYRGDFNNL

SEQ ID NO: 152480 - protein, 10 aa, synthetic construct
DTARGDFNNL

SEQ ID NO: 152481 - protein, 10 aa, synthetic construct
DTDRGDFNNL

SEQ ID NO: 152482 - protein, 10 aa, synthetic construct
DTERGDFNNL

SEQ ID NO: 152483 - protein, 10 aa, synthetic construct
DTNRGDFNNL

SEQ ID NO: 152484 - protein, 10 aa, synthetic construct
DTQRGDFNNL

SEQ ID NO: 152485 - protein, 10 aa, synthetic construct
DTSRGDFNNL

SEQ ID NO: 152486 - protein, 10 aa, synthetic construct
DTTRGDFNNL

SEQ ID NO: 152487 - protein, 10 aa, synthetic construct
DTFRGDFNNL

SEQ ID NO: 152488 - protein, 10 aa, synthetic construct
DTGRGDFNNL

SEQ ID NO: 152489 - protein, 10 aa, synthetic construct
DTHRGDFNNL

SEQ ID NO: 152490 - protein, 10 aa, synthetic construct
DTIRGDFNNL

SEQ ID NO: 152491 - protein, 10 aa, synthetic construct
DTKRGDFNNL

SEQ ID NO: 152492 - protein, 10 aa, synthetic construct
DTLRGDFNNL

SEQ ID NO: 152493 - protein, 10 aa, synthetic construct
DTMRGDFNNL

SEQ ID NO: 152494 - protein, 10 aa, synthetic construct
DTPRGDFNNL

SEQ ID NO: 152495 - protein, 10 aa, synthetic construct
DTRRGDFNNL

SEQ ID NO: 152496 - protein, 10 aa, synthetic construct
DTVRGDFNNL

SEQ ID NO: 152497 - protein, 10 aa, synthetic construct
DTWRGDFNNL

SEQ ID NO: 152498 - protein, 10 aa, synthetic construct
DTYRGDFNNL

SEQ ID NO: 152499 - protein, 10 aa, synthetic construct
DFARGDFNNL

SEQ ID NO: 152500 - protein, 10 aa, synthetic construct
DFDRGDFNNL

SEQ ID NO: 152501 - protein, 10 aa, synthetic construct
DFERGDFNNL

SEQ ID NO: 152502 - protein, 10 aa, synthetic construct
DFNRGDFNNL

SEQ ID NO: 152503 - protein, 10 aa, synthetic construct
DFQRGDFNNL

SEQ ID NO: 152504 - protein, 10 aa, synthetic construct
DFSRGDFNNL

SEQ ID NO: 152505 - protein, 10 aa, synthetic construct
DFTRGDFNNL

SEQ ID NO: 152506 - protein, 10 aa, synthetic construct
DFFRGDFNNL

SEQ ID NO: 152507 - protein, 10 aa, synthetic construct
DFGRGDFNNL

SEQ ID NO: 152508 - protein, 10 aa, synthetic construct
DFHRGDFNNL

SEQ ID NO: 152509 - protein, 10 aa, synthetic construct
DFIRGDFNNL

SEQ ID NO: 152510 - protein, 10 aa, synthetic construct
DFKRGDFNNL

SEQ ID NO: 152511 - protein, 10 aa, synthetic construct
DFLRGDFNNL

SEQ ID NO: 152512 - protein, 10 aa, synthetic construct
DFMRGDFNNL

SEQ ID NO: 152513 - protein, 10 aa, synthetic construct
DFPRGDFNNL

SEQ ID NO: 152514 - protein, 10 aa, synthetic construct
DFRRGDFNNL

SEQ ID NO: 152515 - protein, 10 aa, synthetic construct
DFVRGDFNNL

SEQ ID NO: 152516 - protein, 10 aa, synthetic construct
DFWRGDFNNL

SEQ ID NO: 152517 - protein, 10 aa, synthetic construct
DFYRGDFNNL

SEQ ID NO: 152518 - protein, 10 aa, synthetic construct
DGARGDFNNL

SEQ ID NO: 152519 - protein, 10 aa, synthetic construct
DGDRGDFNNL

SEQ ID NO: 152520 - protein, 10 aa, synthetic construct
DGERGDFNNL

SEQ ID NO: 152521 - protein, 10 aa, synthetic construct
DGNRGDFNNL

SEQ ID NO: 152522 - protein, 10 aa, synthetic construct
DGQRGDFNNL

SEQ ID NO: 152523 - protein, 10 aa, synthetic construct
DGSRGDFNNL

SEQ ID NO: 152524 - protein, 10 aa, synthetic construct
DGTRGDFNNL

SEQ ID NO: 152525 - protein, 10 aa, synthetic construct
DGFRGDFNNL

SEQ ID NO: 152526 - protein, 10 aa, synthetic construct
DGGRGDFNNL

SEQ ID NO: 152527 - protein, 10 aa, synthetic construct
DGHRGDFNNL

SEQ ID NO: 152528 - protein, 10 aa, synthetic construct
DGIRGDFNNL

SEQ ID NO: 152529 - protein, 10 aa, synthetic construct
DGKRGDFNNL

SEQ ID NO: 152530 - protein, 10 aa, synthetic construct
DGLRGDFNNL

SEQ ID NO: 152531 - protein, 10 aa, synthetic construct
DGMRGDFNNL

SEQ ID NO: 152532 - protein, 10 aa, synthetic construct
DGPRGDFNNL

SEQ ID NO: 152533 - protein, 10 aa, synthetic construct
DGRRGDFNNL

SEQ ID NO: 152534 - protein, 10 aa, synthetic construct
DGVRGDFNNL

SEQ ID NO: 152535 - protein, 10 aa, synthetic construct
DGWRGDFNNL

SEQ ID NO: 152536 - protein, 10 aa, synthetic construct
DGYRGDFNNL

SEQ ID NO: 152537 - protein, 10 aa, synthetic construct
DHARGDFNNL

SEQ ID NO: 152538 - protein, 10 aa, synthetic construct
DHDRGDFNNL

SEQ ID NO: 152539 - protein, 10 aa, synthetic construct
DHERGDFNNL

SEQ ID NO: 152540 - protein, 10 aa, synthetic construct
DHNRGDFNNL

SEQ ID NO: 152541 - protein, 10 aa, synthetic construct
DHQRGDFNNL

SEQ ID NO: 152542 - protein, 10 aa, synthetic construct
DHSRGDFNNL

SEQ ID NO: 152543 - protein, 10 aa, synthetic construct
DHTRGDFNNL

SEQ ID NO: 152544 - protein, 10 aa, synthetic construct
DHFRGDFNNL

SEQ ID NO: 152545 - protein, 10 aa, synthetic construct
DHGRGDFNNL

SEQ ID NO: 152546 - protein, 10 aa, synthetic construct
DHHRGDFNNL

SEQ ID NO: 152547 - protein, 10 aa, synthetic construct
DHIRGDFNNL

SEQ ID NO: 152548 - protein, 10 aa, synthetic construct
DHKRGDFNNL

SEQ ID NO: 152549 - protein, 10 aa, synthetic construct
DHLRGDFNNL

SEQ ID NO: 152550 - protein, 10 aa, synthetic construct
DHMRGDFNNL

SEQ ID NO: 152551 - protein, 10 aa, synthetic construct
DHPRGDFNNL

SEQ ID NO: 152552 - protein, 10 aa, synthetic construct
DHRRGDFNNL

SEQ ID NO: 152553 - protein, 10 aa, synthetic construct
DHVRGDFNNL

SEQ ID NO: 152554 - protein, 10 aa, synthetic construct
DHWRGDFNNL

SEQ ID NO: 152555 - protein, 10 aa, synthetic construct
DHYRGDFNNL

SEQ ID NO: 152556 - protein, 10 aa, synthetic construct
DIARGDFNNL

SEQ ID NO: 152557 - protein, 10 aa, synthetic construct
DIDRGDFNNL

SEQ ID NO: 152558 - protein, 10 aa, synthetic construct
DIERGDFNNL

SEQ ID NO: 152559 - protein, 10 aa, synthetic construct
DINRGDFNNL

SEQ ID NO: 152560 - protein, 10 aa, synthetic construct
DIQRGDFNNL

SEQ ID NO: 152561 - protein, 10 aa, synthetic construct
DISRGDFNNL

SEQ ID NO: 152562 - protein, 10 aa, synthetic construct
DITRGDFNNL

SEQ ID NO: 152563 - protein, 10 aa, synthetic construct
DIFRGDFNNL

SEQ ID NO: 152564 - protein, 10 aa, synthetic construct
DIGRGDFNNL

SEQ ID NO: 152565 - protein, 10 aa, synthetic construct
DIHRGDFNNL

SEQ ID NO: 152566 - protein, 10 aa, synthetic construct
DIIRGDFNNL

SEQ ID NO: 152567 - protein, 10 aa, synthetic construct
DIKRGDFNNL

SEQ ID NO: 152568 - protein, 10 aa, synthetic construct
DILRGDFNNL

SEQ ID NO: 152569 - protein, 10 aa, synthetic construct
DIMRGDFNNL

SEQ ID NO: 152570 - protein, 10 aa, synthetic construct
DIPRGDFNNL

SEQ ID NO: 152571 - protein, 10 aa, synthetic construct
DIRRGDFNNL

SEQ ID NO: 152572 - protein, 10 aa, synthetic construct
DIVRGDFNNL

SEQ ID NO: 152573 - protein, 10 aa, synthetic construct
DIWRGDFNNL

SEQ ID NO: 152574 - protein, 10 aa, synthetic construct
DIYRGDFNNL

SEQ ID NO: 152575 - protein, 10 aa, synthetic construct
DKARGDFNNL

SEQ ID NO: 152576 - protein, 10 aa, synthetic construct
DKDRGDFNNL

SEQ ID NO: 152577 - protein, 10 aa, synthetic construct
DKERGDFNNL

SEQ ID NO: 152578 - protein, 10 aa, synthetic construct
DKNRGDFNNL

SEQ ID NO: 152579 - protein, 10 aa, synthetic construct
DKQRGDFNNL

SEQ ID NO: 152580 - protein, 10 aa, synthetic construct
DKSRGDFNNL

SEQ ID NO: 152581 - protein, 10 aa, synthetic construct
DKTRGDFNNL

SEQ ID NO: 152582 - protein, 10 aa, synthetic construct
DKFRGDFNNL

SEQ ID NO: 152583 - protein, 10 aa, synthetic construct
DKGRGDFNNL

SEQ ID NO: 152584 - protein, 10 aa, synthetic construct
DKHRGDFNNL

SEQ ID NO: 152585 - protein, 10 aa, synthetic construct
DKIRGDFNNL

SEQ ID NO: 152586 - protein, 10 aa, synthetic construct
DKKRGDFNNL

SEQ ID NO: 152587 - protein, 10 aa, synthetic construct
DKLRGDFNNL

SEQ ID NO: 152588 - protein, 10 aa, synthetic construct
DKMRGDFNNL

SEQ ID NO: 152589 - protein, 10 aa, synthetic construct
DKPRGDFNNL

SEQ ID NO: 152590 - protein, 10 aa, synthetic construct
DKRRGDFNNL

SEQ ID NO: 152591 - protein, 10 aa, synthetic construct
DKVRGDFNNL

SEQ ID NO: 152592 - protein, 10 aa, synthetic construct
DKWRGDFNNL

SEQ ID NO: 152593 - protein, 10 aa, synthetic construct
DKYRGDFNNL

SEQ ID NO: 152594 - protein, 10 aa, synthetic construct
DLARGDFNNL

SEQ ID NO: 152595 - protein, 10 aa, synthetic construct
DLDRGDFNNL

SEQ ID NO: 152596 - protein, 10 aa, synthetic construct
DLERGDFNNL

SEQ ID NO: 152597 - protein, 10 aa, synthetic construct
DLNRGDFNNL

SEQ ID NO: 152598 - protein, 10 aa, synthetic construct
DLQRGDFNNL

SEQ ID NO: 152599 - protein, 10 aa, synthetic construct
DLSRGDFNNL

SEQ ID NO: 152600 - protein, 10 aa, synthetic construct
DLTRGDFNNL

SEQ ID NO: 152601 - protein, 10 aa, synthetic construct
DLFRGDFNNL

SEQ ID NO: 152602 - protein, 10 aa, synthetic construct
DLGRGDFNNL

SEQ ID NO: 152603 - protein, 10 aa, synthetic construct
DLHRGDFNNL

SEQ ID NO: 152604 - protein, 10 aa, synthetic construct
DLIRGDFNNL

SEQ ID NO: 152605 - protein, 10 aa, synthetic construct
DLKRGDFNNL

SEQ ID NO: 152606 - protein, 10 aa, synthetic construct
DLLRGDFNNL

SEQ ID NO: 152607 - protein, 10 aa, synthetic construct
DLMRGDFNNL

SEQ ID NO: 152608 - protein, 10 aa, synthetic construct
DLPRGDFNNL

SEQ ID NO: 152609 - protein, 10 aa, synthetic construct
DLRRGDFNNL

SEQ ID NO: 152610 - protein, 10 aa, synthetic construct
DLVRGDFNNL

SEQ ID NO: 152611 - protein, 10 aa, synthetic construct
DLWRGDFNNL

SEQ ID NO: 152612 - protein, 10 aa, synthetic construct
DLYRGDFNNL

SEQ ID NO: 152613 - protein, 10 aa, synthetic construct
DMARGDFNNL

SEQ ID NO: 152614 - protein, 10 aa, synthetic construct
DMDRGDFNNL

SEQ ID NO: 152615 - protein, 10 aa, synthetic construct
DMERGDFNNL

SEQ ID NO: 152616 - protein, 10 aa, synthetic construct
DMNRGDFNNL

SEQ ID NO: 152617 - protein, 10 aa, synthetic construct
DMQRGDFNNL

SEQ ID NO: 152618 - protein, 10 aa, synthetic construct
DMSRGDFNNL

SEQ ID NO: 152619 - protein, 10 aa, synthetic construct
DMTRGDFNNL

SEQ ID NO: 152620 - protein, 10 aa, synthetic construct
DMFRGDFNNL

SEQ ID NO: 152621 - protein, 10 aa, synthetic construct
DMGRGDFNNL

SEQ ID NO: 152622 - protein, 10 aa, synthetic construct
DMHRGDFNNL

SEQ ID NO: 152623 - protein, 10 aa, synthetic construct
DMIRGDFNNL

SEQ ID NO: 152624 - protein, 10 aa, synthetic construct
DMKRGDFNNL

SEQ ID NO: 152625 - protein, 10 aa, synthetic construct
DMLRGDFNNL

SEQ ID NO: 152626 - protein, 10 aa, synthetic construct
DMMRGDFNNL

SEQ ID NO: 152627 - protein, 10 aa, synthetic construct
DMPRGDFNNL

SEQ ID NO: 152628 - protein, 10 aa, synthetic construct
DMRRGDFNNL

SEQ ID NO: 152629 - protein, 10 aa, synthetic construct
DMVRGDFNNL

SEQ ID NO: 152630 - protein, 10 aa, synthetic construct
DMWRGDFNNL

SEQ ID NO: 152631 - protein, 10 aa, synthetic construct
DMYRGDFNNL

SEQ ID NO: 152632 - protein, 10 aa, synthetic construct
DPARGDFNNL

SEQ ID NO: 152633 - protein, 10 aa, synthetic construct
DPDRGDFNNL

SEQ ID NO: 152634 - protein, 10 aa, synthetic construct
DPERGDFNNL

SEQ ID NO: 152635 - protein, 10 aa, synthetic construct
DPNRGDFNNL

SEQ ID NO: 152636 - protein, 10 aa, synthetic construct
DPQRGDFNNL

SEQ ID NO: 152637 - protein, 10 aa, synthetic construct
DPSRGDFNNL

SEQ ID NO: 152638 - protein, 10 aa, synthetic construct
DPTRGDFNNL

SEQ ID NO: 152639 - protein, 10 aa, synthetic construct
DPFRGDFNNL

SEQ ID NO: 152640 - protein, 10 aa, synthetic construct
DPGRGDFNNL

SEQ ID NO: 152641 - protein, 10 aa, synthetic construct
DPHRGDFNNL

SEQ ID NO: 152642 - protein, 10 aa, synthetic construct
DPIRGDFNNL

SEQ ID NO: 152643 - protein, 10 aa, synthetic construct
DPKRGDFNNL

SEQ ID NO: 152644 - protein, 10 aa, synthetic construct
DPLRGDFNNL

SEQ ID NO: 152645 - protein, 10 aa, synthetic construct
DPMRGDFNNL

SEQ ID NO: 152646 - protein, 10 aa, synthetic construct
DPPRGDFNNL

SEQ ID NO: 152647 - protein, 10 aa, synthetic construct
DPRRGDFNNL

SEQ ID NO: 152648 - protein, 10 aa, synthetic construct
DPVRGDFNNL

SEQ ID NO: 152649 - protein, 10 aa, synthetic construct
DPWRGDFNNL

SEQ ID NO: 152650 - protein, 10 aa, synthetic construct
DPYRGDFNNL

SEQ ID NO: 152651 - protein, 10 aa, synthetic construct
DRARGDFNNL

SEQ ID NO: 152652 - protein, 10 aa, synthetic construct
DRDRGDFNNL

SEQ ID NO: 152653 - protein, 10 aa, synthetic construct
DRERGDFNNL

SEQ ID NO: 152654 - protein, 10 aa, synthetic construct
DRNRGDFNNL

SEQ ID NO: 152655 - protein, 10 aa, synthetic construct
DRQRGDFNNL

SEQ ID NO: 152656 - protein, 10 aa, synthetic construct
DRSRGDFNNL

SEQ ID NO: 152657 - protein, 10 aa, synthetic construct
DRTRGDFNNL

SEQ ID NO: 152658 - protein, 10 aa, synthetic construct
DRFRGDFNNL

SEQ ID NO: 152659 - protein, 10 aa, synthetic construct
DRGRGDFNNL

SEQ ID NO: 152660 - protein, 10 aa, synthetic construct
DRHRGDFNNL

SEQ ID NO: 152661 - protein, 10 aa, synthetic construct
DRIRGDFNNL

SEQ ID NO: 152662 - protein, 10 aa, synthetic construct
DRKRGDFNNL

SEQ ID NO: 152663 - protein, 10 aa, synthetic construct
DRLRGDFNNL

SEQ ID NO: 152664 - protein, 10 aa, synthetic construct
DRMRGDFNNL

SEQ ID NO: 152665 - protein, 10 aa, synthetic construct
DRPRGDFNNL

SEQ ID NO: 152666 - protein, 10 aa, synthetic construct
DRRRGDFNNL

SEQ ID NO: 152667 - protein, 10 aa, synthetic construct
DRVRGDFNNL

SEQ ID NO: 152668 - protein, 10 aa, synthetic construct
DRWRGDFNNL

SEQ ID NO: 152669 - protein, 10 aa, synthetic construct
DRYRGDFNNL

SEQ ID NO: 152670 - protein, 10 aa, synthetic construct
DVARGDFNNL

SEQ ID NO: 152671 - protein, 10 aa, synthetic construct
DVDRGDFNNL

SEQ ID NO: 152672 - protein, 10 aa, synthetic construct
DVERGDFNNL

SEQ ID NO: 152673 - protein, 10 aa, synthetic construct
DVNRGDFNNL

SEQ ID NO: 152674 - protein, 10 aa, synthetic construct
DVQRGDFNNL

SEQ ID NO: 152675 - protein, 10 aa, synthetic construct
DVSRGDFNNL

SEQ ID NO: 152676 - protein, 10 aa, synthetic construct
DVTRGDFNNL

SEQ ID NO: 152677 - protein, 10 aa, synthetic construct
DVFRGDFNNL

SEQ ID NO: 152678 - protein, 10 aa, synthetic construct
DVGRGDFNNL

SEQ ID NO: 152679 - protein, 10 aa, synthetic construct
DVHRGDFNNL

SEQ ID NO: 152680 - protein, 10 aa, synthetic construct
DVIRGDFNNL

SEQ ID NO: 152681 - protein, 10 aa, synthetic construct
DVKRGDFNNL

SEQ ID NO: 152682 - protein, 10 aa, synthetic construct
DVLRGDFNNL

SEQ ID NO: 152683 - protein, 10 aa, synthetic construct
DVMRGDFNNL

SEQ ID NO: 152684 - protein, 10 aa, synthetic construct
DVPRGDFNNL

SEQ ID NO: 152685 - protein, 10 aa, synthetic construct
DVRRGDFNNL

SEQ ID NO: 152686 - protein, 10 aa, synthetic construct
DVVRGDFNNL

SEQ ID NO: 152687 - protein, 10 aa, synthetic construct
DVWRGDFNNL

SEQ ID NO: 152688 - protein, 10 aa, synthetic construct
DVYRGDFNNL

SEQ ID NO: 152689 - protein, 10 aa, synthetic construct
DWARGDFNNL

SEQ ID NO: 152690 - protein, 10 aa, synthetic construct
DWDRGDFNNL

SEQ ID NO: 152691 - protein, 10 aa, synthetic construct
DWERGDFNNL

SEQ ID NO: 152692 - protein, 10 aa, synthetic construct
DWNRGDFNNL

SEQ ID NO: 152693 - protein, 10 aa, synthetic construct
DWQRGDFNNL

SEQ ID NO: 152694 - protein, 10 aa, synthetic construct
DWSRGDFNNL

SEQ ID NO: 152695 - protein, 10 aa, synthetic construct
DWTRGDFNNL

SEQ ID NO: 152696 - protein, 10 aa, synthetic construct
DWFRGDFNNL

SEQ ID NO: 152697 - protein, 10 aa, synthetic construct
DWGRGDFNNL

SEQ ID NO: 152698 - protein, 10 aa, synthetic construct
DWHRGDFNNL

SEQ ID NO: 152699 - protein, 10 aa, synthetic construct
DWIRGDFNNL

SEQ ID NO: 152700 - protein, 10 aa, synthetic construct
DWKRGDFNNL

SEQ ID NO: 152701 - protein, 10 aa, synthetic construct
DWLRGDFNNL

SEQ ID NO: 152702 - protein, 10 aa, synthetic construct
DWMRGDFNNL

SEQ ID NO: 152703 - protein, 10 aa, synthetic construct
DWPRGDFNNL

SEQ ID NO: 152704 - protein, 10 aa, synthetic construct
DWRRGDFNNL

SEQ ID NO: 152705 - protein, 10 aa, synthetic construct
DWVRGDFNNL

SEQ ID NO: 152706 - protein, 10 aa, synthetic construct
DWWRGDFNNL

SEQ ID NO: 152707 - protein, 10 aa, synthetic construct
DWYRGDFNNL

SEQ ID NO: 152708 - protein, 10 aa, synthetic construct
DYARGDFNNL

SEQ ID NO: 152709 - protein, 10 aa, synthetic construct
DYDRGDFNNL

SEQ ID NO: 152710 - protein, 10 aa, synthetic construct
DYERGDFNNL

SEQ ID NO: 152711 - protein, 10 aa, synthetic construct
DYNRGDFNNL

SEQ ID NO: 152712 - protein, 10 aa, synthetic construct
DYQRGDFNNL

SEQ ID NO: 152713 - protein, 10 aa, synthetic construct
DYSRGDFNNL

SEQ ID NO: 152714 - protein, 10 aa, synthetic construct
DYTRGDFNNL

SEQ ID NO: 152715 - protein, 10 aa, synthetic construct
DYFRGDFNNL

SEQ ID NO: 152716 - protein, 10 aa, synthetic construct
DYGRGDFNNL

SEQ ID NO: 152717 - protein, 10 aa, synthetic construct
DYHRGDFNNL

SEQ ID NO: 152718 - protein, 10 aa, synthetic construct
DYIRGDFNNL

SEQ ID NO: 152719 - protein, 10 aa, synthetic construct
DYKRGDFNNL

SEQ ID NO: 152720 - protein, 10 aa, synthetic construct
DYLRGDFNNL

SEQ ID NO: 152721 - protein, 10 aa, synthetic construct
DYMRGDFNNL

SEQ ID NO: 152722 - protein, 10 aa, synthetic construct
DYPRGDFNNL

SEQ ID NO: 152723 - protein, 10 aa, synthetic construct
DYRRGDFNNL

SEQ ID NO: 152724 - protein, 10 aa, synthetic construct
DYVRGDFNNL

SEQ ID NO: 152725 - protein, 10 aa, synthetic construct
DYWRGDFNNL

SEQ ID NO: 152726 - protein, 10 aa, synthetic construct
DYYRGDFNNL

SEQ ID NO: 152727 - protein, 10 aa, synthetic construct
EAARGDFNNL

SEQ ID NO: 152728 - protein, 10 aa, synthetic construct
EADRGDFNNL

SEQ ID NO: 152729 - protein, 10 aa, synthetic construct
EAERGDFNNL

SEQ ID NO: 152730 - protein, 10 aa, synthetic construct
EANRGDFNNL

SEQ ID NO: 152731 - protein, 10 aa, synthetic construct
EAQRGDFNNL

SEQ ID NO: 152732 - protein, 10 aa, synthetic construct
EASRGDFNNL

SEQ ID NO: 152733 - protein, 10 aa, synthetic construct
EATRGDFNNL

SEQ ID NO: 152734 - protein, 10 aa, synthetic construct
EAFRGDFNNL

SEQ ID NO: 152735 - protein, 10 aa, synthetic construct
EAGRGDFNNL

SEQ ID NO: 152736 - protein, 10 aa, synthetic construct
EAHRGDFNNL

SEQ ID NO: 152737 - protein, 10 aa, synthetic construct
EAIRGDFNNL

SEQ ID NO: 152738 - protein, 10 aa, synthetic construct
EAKRGDFNNL

SEQ ID NO: 152739 - protein, 10 aa, synthetic construct
EALRGDFNNL

SEQ ID NO: 152740 - protein, 10 aa, synthetic construct
EAMRGDFNNL

SEQ ID NO: 152741 - protein, 10 aa, synthetic construct
EAPRGDFNNL

SEQ ID NO: 152742 - protein, 10 aa, synthetic construct
EARRGDFNNL

SEQ ID NO: 152743 - protein, 10 aa, synthetic construct
EAVRGDFNNL

SEQ ID NO: 152744 - protein, 10 aa, synthetic construct
EAWRGDFNNL

SEQ ID NO: 152745 - protein, 10 aa, synthetic construct
EAYRGDFNNL

SEQ ID NO: 152746 - protein, 10 aa, synthetic construct
EDARGDFNNL

SEQ ID NO: 152747 - protein, 10 aa, synthetic construct
EDDRGDFNNL

SEQ ID NO: 152748 - protein, 10 aa, synthetic construct
EDERGDFNNL

SEQ ID NO: 152749 - protein, 10 aa, synthetic construct
EDNRGDFNNL

SEQ ID NO: 152750 - protein, 10 aa, synthetic construct
EDQRGDFNNL

SEQ ID NO: 152751 - protein, 10 aa, synthetic construct
EDSRGDFNNL

SEQ ID NO: 152752 - protein, 10 aa, synthetic construct
EDTRGDFNNL

SEQ ID NO: 152753 - protein, 10 aa, synthetic construct
EDFRGDFNNL

SEQ ID NO: 152754 - protein, 10 aa, synthetic construct
EDGRGDFNNL

SEQ ID NO: 152755 - protein, 10 aa, synthetic construct
EDHRGDFNNL

SEQ ID NO: 152756 - protein, 10 aa, synthetic construct
EDIRGDFNNL

SEQ ID NO: 152757 - protein, 10 aa, synthetic construct
EDKRGDFNNL

SEQ ID NO: 152758 - protein, 10 aa, synthetic construct
EDLRGDFNNL

SEQ ID NO: 152759 - protein, 10 aa, synthetic construct
EDMRGDFNNL

SEQ ID NO: 152760 - protein, 10 aa, synthetic construct
EDPRGDFNNL

SEQ ID NO: 152761 - protein, 10 aa, synthetic construct
EDRRGDFNNL

SEQ ID NO: 152762 - protein, 10 aa, synthetic construct
EDVRGDFNNL

SEQ ID NO: 152763 - protein, 10 aa, synthetic construct
EDWRGDFNNL

SEQ ID NO: 152764 - protein, 10 aa, synthetic construct
EDYRGDFNNL

SEQ ID NO: 152765 - protein, 10 aa, synthetic construct
EEARGDFNNL

SEQ ID NO: 152766 - protein, 10 aa, synthetic construct
EEDRGDFNNL

SEQ ID NO: 152767 - protein, 10 aa, synthetic construct
EEERGDFNNL

SEQ ID NO: 152768 - protein, 10 aa, synthetic construct
EENRGDFNNL

SEQ ID NO: 152769 - protein, 10 aa, synthetic construct
EEQRGDFNNL

SEQ ID NO: 152770 - protein, 10 aa, synthetic construct
EESRGDFNNL

SEQ ID NO: 152771 - protein, 10 aa, synthetic construct
EETRGDFNNL

SEQ ID NO: 152772 - protein, 10 aa, synthetic construct
EEFRGDFNNL

SEQ ID NO: 152773 - protein, 10 aa, synthetic construct
EEGRGDFNNL

SEQ ID NO: 152774 - protein, 10 aa, synthetic construct
EEHRGDFNNL

SEQ ID NO: 152775 - protein, 10 aa, synthetic construct
EEIRGDFNNL

SEQ ID NO: 152776 - protein, 10 aa, synthetic construct
EEKRGDFNNL

SEQ ID NO: 152777 - protein, 10 aa, synthetic construct
EELRGDFNNL

SEQ ID NO: 152778 - protein, 10 aa, synthetic construct
EEMRGDFNNL

SEQ ID NO: 152779 - protein, 10 aa, synthetic construct
EEPRGDFNNL

SEQ ID NO: 152780 - protein, 10 aa, synthetic construct
EERRGDFNNL

SEQ ID NO: 152781 - protein, 10 aa, synthetic construct
EEVRGDFNNL

SEQ ID NO: 152782 - protein, 10 aa, synthetic construct
EEWRGDFNNL

SEQ ID NO: 152783 - protein, 10 aa, synthetic construct
EEYRGDFNNL

SEQ ID NO: 152784 - protein, 10 aa, synthetic construct
ENARGDFNNL

SEQ ID NO: 152785 - protein, 10 aa, synthetic construct
ENDRGDFNNL

SEQ ID NO: 152786 - protein, 10 aa, synthetic construct
ENERGDFNNL

SEQ ID NO: 152787 - protein, 10 aa, synthetic construct
ENNRGDFNNL

SEQ ID NO: 152788 - protein, 10 aa, synthetic construct
ENQRGDFNNL

SEQ ID NO: 152789 - protein, 10 aa, synthetic construct
ENSRGDFNNL

SEQ ID NO: 152790 - protein, 10 aa, synthetic construct
ENTRGDFNNL

SEQ ID NO: 152791 - protein, 10 aa, synthetic construct
ENFRGDFNNL

SEQ ID NO: 152792 - protein, 10 aa, synthetic construct
ENGRGDFNNL

SEQ ID NO: 152793 - protein, 10 aa, synthetic construct
ENHRGDFNNL

SEQ ID NO: 152794 - protein, 10 aa, synthetic construct
ENIRGDFNNL

SEQ ID NO: 152795 - protein, 10 aa, synthetic construct
ENKRGDFNNL

SEQ ID NO: 152796 - protein, 10 aa, synthetic construct
ENLRGDFNNL

SEQ ID NO: 152797 - protein, 10 aa, synthetic construct
ENMRGDFNNL

SEQ ID NO: 152798 - protein, 10 aa, synthetic construct
ENPRGDFNNL

SEQ ID NO: 152799 - protein, 10 aa, synthetic construct
ENVRGDFNNL

SEQ ID NO: 152800 - protein, 10 aa, synthetic construct
ENWRGDFNNL

SEQ ID NO: 152801 - protein, 10 aa, synthetic construct
ENYRGDFNNL

SEQ ID NO: 152802 - protein, 10 aa, synthetic construct
EQARGDFNNL

SEQ ID NO: 152803 - protein, 10 aa, synthetic construct
EQDRGDFNNL

SEQ ID NO: 152804 - protein, 10 aa, synthetic construct
EQERGDFNNL

SEQ ID NO: 152805 - protein, 10 aa, synthetic construct
EQNRGDFNNL

SEQ ID NO: 152806 - protein, 10 aa, synthetic construct
EQQRGDFNNL

SEQ ID NO: 152807 - protein, 10 aa, synthetic construct
EQSRGDFNNL

SEQ ID NO: 152808 - protein, 10 aa, synthetic construct
EQTRGDFNNL

SEQ ID NO: 152809 - protein, 10 aa, synthetic construct
EQFRGDFNNL

SEQ ID NO: 152810 - protein, 10 aa, synthetic construct
EQGRGDFNNL

SEQ ID NO: 152811 - protein, 10 aa, synthetic construct
EQHRGDFNNL

SEQ ID NO: 152812 - protein, 10 aa, synthetic construct
EQIRGDFNNL

SEQ ID NO: 152813 - protein, 10 aa, synthetic construct
EQKRGDFNNL

SEQ ID NO: 152814 - protein, 10 aa, synthetic construct
EQLRGDFNNL

SEQ ID NO: 152815 - protein, 10 aa, synthetic construct
EQMRGDFNNL

SEQ ID NO: 152816 - protein, 10 aa, synthetic construct
EQPRGDFNNL

SEQ ID NO: 152817 - protein, 10 aa, synthetic construct
EQRRGDFNNL

SEQ ID NO: 152818 - protein, 10 aa, synthetic construct
EQVRGDFNNL

SEQ ID NO: 152819 - protein, 10 aa, synthetic construct
EQWRGDFNNL

SEQ ID NO: 152820 - protein, 10 aa, synthetic construct
EQYRGDFNNL

SEQ ID NO: 152821 - protein, 10 aa, synthetic construct
ESARGDFNNL

SEQ ID NO: 152822 - protein, 10 aa, synthetic construct
ESDRGDFNNL

SEQ ID NO: 152823 - protein, 10 aa, synthetic construct
ESERGDFNNL

SEQ ID NO: 152824 - protein, 10 aa, synthetic construct
ESNRGDFNNL

SEQ ID NO: 152825 - protein, 10 aa, synthetic construct
ESQRGDFNNL

SEQ ID NO: 152826 - protein, 10 aa, synthetic construct
ESSRGDFNNL

SEQ ID NO: 152827 - protein, 10 aa, synthetic construct
ESTRGDFNNL

SEQ ID NO: 152828 - protein, 10 aa, synthetic construct
ESFRGDFNNL

SEQ ID NO: 152829 - protein, 10 aa, synthetic construct
ESGRGDFNNL

SEQ ID NO: 152830 - protein, 10 aa, synthetic construct
ESHRGDFNNL

SEQ ID NO: 152831 - protein, 10 aa, synthetic construct
ESIRGDFNNL

SEQ ID NO: 152832 - protein, 10 aa, synthetic construct
ESKRGDFNNL

SEQ ID NO: 152833 - protein, 10 aa, synthetic construct
ESLRGDFNNL

SEQ ID NO: 152834 - protein, 10 aa, synthetic construct
ESMRGDFNNL

SEQ ID NO: 152835 - protein, 10 aa, synthetic construct
ESPRGDFNNL

SEQ ID NO: 152836 - protein, 10 aa, synthetic construct
ESRRGDFNNL

SEQ ID NO: 152837 - protein, 10 aa, synthetic construct
ESVRGDFNNL

SEQ ID NO: 152838 - protein, 10 aa, synthetic construct
ESWRGDFNNL

SEQ ID NO: 152839 - protein, 10 aa, synthetic construct
ESYRGDFNNL

SEQ ID NO: 152840 - protein, 10 aa, synthetic construct
ETARGDFNNL

SEQ ID NO: 152841 - protein, 10 aa, synthetic construct
ETDRGDFNNL

SEQ ID NO: 152842 - protein, 10 aa, synthetic construct
ETERGDFNNL

SEQ ID NO: 152843 - protein, 10 aa, synthetic construct
ETNRGDFNNL

SEQ ID NO: 152844 - protein, 10 aa, synthetic construct
ETQRGDFNNL

SEQ ID NO: 152845 - protein, 10 aa, synthetic construct
ETSRGDFNNL

SEQ ID NO: 152846 - protein, 10 aa, synthetic construct
ETTRGDFNNL

SEQ ID NO: 152847 - protein, 10 aa, synthetic construct
ETFRGDFNNL

SEQ ID NO: 152848 - protein, 10 aa, synthetic construct
ETGRGDFNNL

SEQ ID NO: 152849 - protein, 10 aa, synthetic construct
ETHRGDFNNL

SEQ ID NO: 152850 - protein, 10 aa, synthetic construct
ETIRGDFNNL

SEQ ID NO: 152851 - protein, 10 aa, synthetic construct
ETKRGDFNNL

SEQ ID NO: 152852 - protein, 10 aa, synthetic construct
ETLRGDFNNL

SEQ ID NO: 152853 - protein, 10 aa, synthetic construct
ETMRGDFNNL

SEQ ID NO: 152854 - protein, 10 aa, synthetic construct
ETPRGDFNNL

SEQ ID NO: 152855 - protein, 10 aa, synthetic construct
ETRRGDFNNL

SEQ ID NO: 152856 - protein, 10 aa, synthetic construct
ETVRGDFNNL

SEQ ID NO: 152857 - protein, 10 aa, synthetic construct
ETWRGDFNNL

SEQ ID NO: 152858 - protein, 10 aa, synthetic construct
ETYRGDFNNL

SEQ ID NO: 152859 - protein, 10 aa, synthetic construct
EFARGDFNNL

SEQ ID NO: 152860 - protein, 10 aa, synthetic construct
EFDRGDFNNL

SEQ ID NO: 152861 - protein, 10 aa, synthetic construct
EFERGDFNNL

SEQ ID NO: 152862 - protein, 10 aa, synthetic construct
EFNRGDFNNL

SEQ ID NO: 152863 - protein, 10 aa, synthetic construct
EFQRGDFNNL

SEQ ID NO: 152864 - protein, 10 aa, synthetic construct
EFSRGDFNNL

SEQ ID NO: 152865 - protein, 10 aa, synthetic construct
EFTRGDFNNL

SEQ ID NO: 152866 - protein, 10 aa, synthetic construct
EFFRGDFNNL

SEQ ID NO: 152867 - protein, 10 aa, synthetic construct
EFGRGDFNNL

SEQ ID NO: 152868 - protein, 10 aa, synthetic construct
EFHRGDFNNL

SEQ ID NO: 152869 - protein, 10 aa, synthetic construct
EFIRGDFNNL

SEQ ID NO: 152870 - protein, 10 aa, synthetic construct
EFKRGDFNNL

SEQ ID NO: 152871 - protein, 10 aa, synthetic construct
EFLRGDFNNL

SEQ ID NO: 152872 - protein, 10 aa, synthetic construct
EFMRGDFNNL

SEQ ID NO: 152873 - protein, 10 aa, synthetic construct
EFPRGDFNNL

SEQ ID NO: 152874 - protein, 10 aa, synthetic construct
EFRRGDFNNL

SEQ ID NO: 152875 - protein, 10 aa, synthetic construct
EFVRGDFNNL

SEQ ID NO: 152876 - protein, 10 aa, synthetic construct
EFWRGDFNNL

SEQ ID NO: 152877 - protein, 10 aa, synthetic construct
EFYRGDFNNL

SEQ ID NO: 152878 - protein, 10 aa, synthetic construct
EGARGDFNNL

SEQ ID NO: 152879 - protein, 10 aa, synthetic construct
EGDRGDFNNL

SEQ ID NO: 152880 - protein, 10 aa, synthetic construct
EGERGDFNNL

SEQ ID NO: 152881 - protein, 10 aa, synthetic construct
EGNRGDFNNL

SEQ ID NO: 152882 - protein, 10 aa, synthetic construct
EGQRGDFNNL

SEQ ID NO: 152883 - protein, 10 aa, synthetic construct
EGSRGDFNNL

SEQ ID NO: 152884 - protein, 10 aa, synthetic construct
EGTRGDFNNL

SEQ ID NO: 152885 - protein, 10 aa, synthetic construct
EGFRGDFNNL

SEQ ID NO: 152886 - protein, 10 aa, synthetic construct
EGGRGDFNNL

SEQ ID NO: 152887 - protein, 10 aa, synthetic construct
EGHRGDFNNL

SEQ ID NO: 152888 - protein, 10 aa, synthetic construct
EGIRGDFNNL

SEQ ID NO: 152889 - protein, 10 aa, synthetic construct
EGKRGDFNNL

SEQ ID NO: 152890 - protein, 10 aa, synthetic construct
EGLRGDFNNL

SEQ ID NO: 152891 - protein, 10 aa, synthetic construct
EGMRGDFNNL

SEQ ID NO: 152892 - protein, 10 aa, synthetic construct
EGPRGDFNNL

SEQ ID NO: 152893 - protein, 10 aa, synthetic construct
EGRRGDFNNL

SEQ ID NO: 152894 - protein, 10 aa, synthetic construct
EGVRGDFNNL

SEQ ID NO: 152895 - protein, 10 aa, synthetic construct
EGWRGDFNNL

SEQ ID NO: 152896 - protein, 10 aa, synthetic construct
EGYRGDFNNL

SEQ ID NO: 152897 - protein, 10 aa, synthetic construct
EHARGDFNNL

SEQ ID NO: 152898 - protein, 10 aa, synthetic construct
EHDRGDFNNL

SEQ ID NO: 152899 - protein, 10 aa, synthetic construct
EHERGDFNNL

SEQ ID NO: 152900 - protein, 10 aa, synthetic construct
EHNRGDFNNL

SEQ ID NO: 152901 - protein, 10 aa, synthetic construct
EHQRGDFNNL

SEQ ID NO: 152902 - protein, 10 aa, synthetic construct
EHSRGDFNNL

SEQ ID NO: 152903 - protein, 10 aa, synthetic construct
EHTRGDFNNL

SEQ ID NO: 152904 - protein, 10 aa, synthetic construct
EHFRGDFNNL

SEQ ID NO: 152905 - protein, 10 aa, synthetic construct
EHGRGDFNNL

SEQ ID NO: 152906 - protein, 10 aa, synthetic construct
EHHRGDFNNL

SEQ ID NO: 152907 - protein, 10 aa, synthetic construct
EHIRGDFNNL

SEQ ID NO: 152908 - protein, 10 aa, synthetic construct
EHKRGDFNNL

SEQ ID NO: 152909 - protein, 10 aa, synthetic construct
EHLRGDFNNL

SEQ ID NO: 152910 - protein, 10 aa, synthetic construct
EHMRGDFNNL

SEQ ID NO: 152911 - protein, 10 aa, synthetic construct
EHPRGDFNNL

SEQ ID NO: 152912 - protein, 10 aa, synthetic construct
EHRRGDFNNL

SEQ ID NO: 152913 - protein, 10 aa, synthetic construct
EHVRGDFNNL

SEQ ID NO: 152914 - protein, 10 aa, synthetic construct
EHWRGDFNNL

SEQ ID NO: 152915 - protein, 10 aa, synthetic construct
EHYRGDFNNL

SEQ ID NO: 152916 - protein, 10 aa, synthetic construct
EIARGDFNNL

SEQ ID NO: 152917 - protein, 10 aa, synthetic construct
EIDRGDFNNL

SEQ ID NO: 152918 - protein, 10 aa, synthetic construct
EIERGDFNNL

SEQ ID NO: 152919 - protein, 10 aa, synthetic construct
EINRGDFNNL

SEQ ID NO: 152920 - protein, 10 aa, synthetic construct
EIQRGDFNNL

SEQ ID NO: 152921 - protein, 10 aa, synthetic construct
EISRGDFNNL

SEQ ID NO: 152922 - protein, 10 aa, synthetic construct
EITRGDFNNL

SEQ ID NO: 152923 - protein, 10 aa, synthetic construct
EIFRGDFNNL

SEQ ID NO: 152924 - protein, 10 aa, synthetic construct
EIGRGDFNNL

SEQ ID NO: 152925 - protein, 10 aa, synthetic construct
EIHRGDFNNL

SEQ ID NO: 152926 - protein, 10 aa, synthetic construct
EIIRGDFNNL

SEQ ID NO: 152927 - protein, 10 aa, synthetic construct
EIKRGDFNNL

SEQ ID NO: 152928 - protein, 10 aa, synthetic construct
EILRGDFNNL

SEQ ID NO: 152929 - protein, 10 aa, synthetic construct
EIMRGDFNNL

SEQ ID NO: 152930 - protein, 10 aa, synthetic construct
EIPRGDFNNL

SEQ ID NO: 152931 - protein, 10 aa, synthetic construct
EIRRGDFNNL

SEQ ID NO: 152932 - protein, 10 aa, synthetic construct
EIVRGDFNNL

SEQ ID NO: 152933 - protein, 10 aa, synthetic construct
EIWRGDFNNL

SEQ ID NO: 152934 - protein, 10 aa, synthetic construct
EIYRGDFNNL

SEQ ID NO: 152935 - protein, 10 aa, synthetic construct
EKARGDFNNL

SEQ ID NO: 152936 - protein, 10 aa, synthetic construct
EKDRGDFNNL

SEQ ID NO: 152937 - protein, 10 aa, synthetic construct
EKERGDFNNL

SEQ ID NO: 152938 - protein, 10 aa, synthetic construct
EKNRGDFNNL

SEQ ID NO: 152939 - protein, 10 aa, synthetic construct
EKQRGDFNNL

SEQ ID NO: 152940 - protein, 10 aa, synthetic construct
EKSRGDFNNL

SEQ ID NO: 152941 - protein, 10 aa, synthetic construct
EKTRGDFNNL

SEQ ID NO: 152942 - protein, 10 aa, synthetic construct
EKFRGDFNNL

SEQ ID NO: 152943 - protein, 10 aa, synthetic construct
EKGRGDFNNL

SEQ ID NO: 152944 - protein, 10 aa, synthetic construct
EKHRGDFNNL

SEQ ID NO: 152945 - protein, 10 aa, synthetic construct
EKIRGDFNNL

SEQ ID NO: 152946 - protein, 10 aa, synthetic construct
EKKRGDFNNL

SEQ ID NO: 152947 - protein, 10 aa, synthetic construct
EKLRGDFNNL

SEQ ID NO: 152948 - protein, 10 aa, synthetic construct
EKMRGDFNNL

SEQ ID NO: 152949 - protein, 10 aa, synthetic construct
EKPRGDFNNL

SEQ ID NO: 152950 - protein, 10 aa, synthetic construct
EKRRGDFNNL

SEQ ID NO: 152951 - protein, 10 aa, synthetic construct
EKVRGDFNNL

SEQ ID NO: 152952 - protein, 10 aa, synthetic construct
EKWRGDFNNL

SEQ ID NO: 152953 - protein, 10 aa, synthetic construct
EKYRGDFNNL

SEQ ID NO: 152954 - protein, 10 aa, synthetic construct
ELARGDFNNL

SEQ ID NO: 152955 - protein, 10 aa, synthetic construct
ELDRGDFNNL

SEQ ID NO: 152956 - protein, 10 aa, synthetic construct
ELERGDFNNL

SEQ ID NO: 152957 - protein, 10 aa, synthetic construct
ELNRGDFNNL

SEQ ID NO: 152958 - protein, 10 aa, synthetic construct
ELQRGDFNNL

SEQ ID NO: 152959 - protein, 10 aa, synthetic construct
ELSRGDFNNL

SEQ ID NO: 152960 - protein, 10 aa, synthetic construct
ELTRGDFNNL

SEQ ID NO: 152961 - protein, 10 aa, synthetic construct
ELFRGDFNNL

SEQ ID NO: 152962 - protein, 10 aa, synthetic construct
ELGRGDFNNL

SEQ ID NO: 152963 - protein, 10 aa, synthetic construct
ELHRGDFNNL

SEQ ID NO: 152964 - protein, 10 aa, synthetic construct
ELIRGDFNNL

SEQ ID NO: 152965 - protein, 10 aa, synthetic construct
ELKRGDFNNL

SEQ ID NO: 152966 - protein, 10 aa, synthetic construct
ELLRGDFNNL

SEQ ID NO: 152967 - protein, 10 aa, synthetic construct
ELMRGDFNNL

SEQ ID NO: 152968 - protein, 10 aa, synthetic construct
ELPRGDFNNL

SEQ ID NO: 152969 - protein, 10 aa, synthetic construct
ELRRGDFNNL

SEQ ID NO: 152970 - protein, 10 aa, synthetic construct
ELVRGDFNNL

SEQ ID NO: 152971 - protein, 10 aa, synthetic construct
ELWRGDFNNL

SEQ ID NO: 152972 - protein, 10 aa, synthetic construct
ELYRGDFNNL

SEQ ID NO: 152973 - protein, 10 aa, synthetic construct
EMARGDFNNL

SEQ ID NO: 152974 - protein, 10 aa, synthetic construct
EMDRGDFNNL

SEQ ID NO: 152975 - protein, 10 aa, synthetic construct
EMERGDFNNL

SEQ ID NO: 152976 - protein, 10 aa, synthetic construct
EMNRGDFNNL

SEQ ID NO: 152977 - protein, 10 aa, synthetic construct
EMQRGDFNNL

SEQ ID NO: 152978 - protein, 10 aa, synthetic construct
EMSRGDFNNL

SEQ ID NO: 152979 - protein, 10 aa, synthetic construct
EMTRGDFNNL

SEQ ID NO: 152980 - protein, 10 aa, synthetic construct
EMFRGDFNNL

SEQ ID NO: 152981 - protein, 10 aa, synthetic construct
EMGRGDFNNL

SEQ ID NO: 152982 - protein, 10 aa, synthetic construct
EMHRGDFNNL

SEQ ID NO: 152983 - protein, 10 aa, synthetic construct
EMIRGDFNNL

SEQ ID NO: 152984 - protein, 10 aa, synthetic construct
EMKRGDFNNL

SEQ ID NO: 152985 - protein, 10 aa, synthetic construct
EMLRGDFNNL

SEQ ID NO: 152986 - protein, 10 aa, synthetic construct
EMMRGDFNNL

SEQ ID NO: 152987 - protein, 10 aa, synthetic construct
EMPRGDFNNL

SEQ ID NO: 152988 - protein, 10 aa, synthetic construct
EMRRGDFNNL

SEQ ID NO: 152989 - protein, 10 aa, synthetic construct
EMVRGDFNNL

SEQ ID NO: 152990 - protein, 10 aa, synthetic construct
EMWRGDFNNL

SEQ ID NO: 152991 - protein, 10 aa, synthetic construct
EMYRGDFNNL

SEQ ID NO: 152992 - protein, 10 aa, synthetic construct
EPARGDFNNL

SEQ ID NO: 152993 - protein, 10 aa, synthetic construct
EPDRGDFNNL

SEQ ID NO: 152994 - protein, 10 aa, synthetic construct
EPERGDFNNL

SEQ ID NO: 152995 - protein, 10 aa, synthetic construct
EPNRGDFNNL

SEQ ID NO: 152996 - protein, 10 aa, synthetic construct
EPQRGDFNNL

SEQ ID NO: 152997 - protein, 10 aa, synthetic construct
EPSRGDFNNL

SEQ ID NO: 152998 - protein, 10 aa, synthetic construct
EPTRGDFNNL

SEQ ID NO: 152999 - protein, 10 aa, synthetic construct
EPFRGDFNNL

SEQ ID NO: 153000 - protein, 10 aa, synthetic construct
EPGRGDFNNL

SEQ ID NO: 153001 - protein, 10 aa, synthetic construct
EPHRGDFNNL

SEQ ID NO: 153002 - protein, 10 aa, synthetic construct
EPIRGDFNNL

SEQ ID NO: 153003 - protein, 10 aa, synthetic construct
EPKRGDFNNL

SEQ ID NO: 153004 - protein, 10 aa, synthetic construct
EPLRGDFNNL

SEQ ID NO: 153005 - protein, 10 aa, synthetic construct
EPMRGDFNNL

SEQ ID NO: 153006 - protein, 10 aa, synthetic construct
EPPRGDFNNL

SEQ ID NO: 153007 - protein, 10 aa, synthetic construct
EPRRGDFNNL

SEQ ID NO: 153008 - protein, 10 aa, synthetic construct
EPVRGDFNNL

SEQ ID NO: 153009 - protein, 10 aa, synthetic construct
EPWRGDFNNL

SEQ ID NO: 153010 - protein, 10 aa, synthetic construct
EPYRGDFNNL

SEQ ID NO: 153011 - protein, 10 aa, synthetic construct
ERARGDFNNL

SEQ ID NO: 153012 - protein, 10 aa, synthetic construct
ERDRGDFNNL

SEQ ID NO: 153013 - protein, 10 aa, synthetic construct
ERERGDFNNL

SEQ ID NO: 153014 - protein, 10 aa, synthetic construct
ERNRGDFNNL

SEQ ID NO: 153015 - protein, 10 aa, synthetic construct
ERQRGDFNNL

SEQ ID NO: 153016 - protein, 10 aa, synthetic construct
ERSRGDFNNL

SEQ ID NO: 153017 - protein, 10 aa, synthetic construct
ERTRGDFNNL

SEQ ID NO: 153018 - protein, 10 aa, synthetic construct
ERFRGDFNNL

SEQ ID NO: 153019 - protein, 10 aa, synthetic construct
ERGRGDFNNL

SEQ ID NO: 153020 - protein, 10 aa, synthetic construct
ERHRGDFNNL

SEQ ID NO: 153021 - protein, 10 aa, synthetic construct
ERIRGDFNNL

SEQ ID NO: 153022 - protein, 10 aa, synthetic construct
ERKRGDFNNL

SEQ ID NO: 153023 - protein, 10 aa, synthetic construct
ERLRGDFNNL

SEQ ID NO: 153024 - protein, 10 aa, synthetic construct
ERMRGDFNNL

SEQ ID NO: 153025 - protein, 10 aa, synthetic construct
ERPRGDFNNL

SEQ ID NO: 153026 - protein, 10 aa, synthetic construct
ERRRGDFNNL

SEQ ID NO: 153027 - protein, 10 aa, synthetic construct
ERVRGDFNNL

SEQ ID NO: 153028 - protein, 10 aa, synthetic construct
ERWRGDFNNL

SEQ ID NO: 153029 - protein, 10 aa, synthetic construct
ERYRGDFNNL

SEQ ID NO: 153030 - protein, 10 aa, synthetic construct
EVARGDFNNL

SEQ ID NO: 153031 - protein, 10 aa, synthetic construct
EVDRGDFNNL

SEQ ID NO: 153032 - protein, 10 aa, synthetic construct
EVERGDFNNL

SEQ ID NO: 153033 - protein, 10 aa, synthetic construct
EVNRGDFNNL

SEQ ID NO: 153034 - protein, 10 aa, synthetic construct
EVQRGDFNNL

SEQ ID NO: 153035 - protein, 10 aa, synthetic construct
EVSRGDFNNL

SEQ ID NO: 153036 - protein, 10 aa, synthetic construct
EVTRGDFNNL

SEQ ID NO: 153037 - protein, 10 aa, synthetic construct
EVFRGDFNNL

SEQ ID NO: 153038 - protein, 10 aa, synthetic construct
EVGRGDFNNL

SEQ ID NO: 153039 - protein, 10 aa, synthetic construct
EVHRGDFNNL

SEQ ID NO: 153040 - protein, 10 aa, synthetic construct
EVIRGDFNNL

SEQ ID NO: 153041 - protein, 10 aa, synthetic construct
EVKRGDFNNL

SEQ ID NO: 153042 - protein, 10 aa, synthetic construct
EVLRGDFNNL

SEQ ID NO: 153043 - protein, 10 aa, synthetic construct
EVMRGDFNNL

SEQ ID NO: 153044 - protein, 10 aa, synthetic construct
EVPRGDFNNL

SEQ ID NO: 153045 - protein, 10 aa, synthetic construct
EVRRGDFNNL

SEQ ID NO: 153046 - protein, 10 aa, synthetic construct
EVVRGDFNNL

SEQ ID NO: 153047 - protein, 10 aa, synthetic construct
EVWRGDFNNL

SEQ ID NO: 153048 - protein, 10 aa, synthetic construct
EVYRGDFNNL

SEQ ID NO: 153049 - protein, 10 aa, synthetic construct
EWARGDFNNL

SEQ ID NO: 153050 - protein, 10 aa, synthetic construct
EWDRGDFNNL

SEQ ID NO: 153051 - protein, 10 aa, synthetic construct
EWERGDFNNL

SEQ ID NO: 153052 - protein, 10 aa, synthetic construct
EWNRGDFNNL

SEQ ID NO: 153053 - protein, 10 aa, synthetic construct
EWQRGDFNNL

SEQ ID NO: 153054 - protein, 10 aa, synthetic construct
EWSRGDFNNL

SEQ ID NO: 153055 - protein, 10 aa, synthetic construct
EWTRGDFNNL

SEQ ID NO: 153056 - protein, 10 aa, synthetic construct
EWFRGDFNNL

SEQ ID NO: 153057 - protein, 10 aa, synthetic construct
EWGRGDFNNL

SEQ ID NO: 153058 - protein, 10 aa, synthetic construct
EWHRGDFNNL

SEQ ID NO: 153059 - protein, 10 aa, synthetic construct
EWIRGDFNNL

SEQ ID NO: 153060 - protein, 10 aa, synthetic construct
EWKRGDFNNL

SEQ ID NO: 153061 - protein, 10 aa, synthetic construct
EWLRGDFNNL

SEQ ID NO: 153062 - protein, 10 aa, synthetic construct
EWMRGDFNNL

SEQ ID NO: 153063 - protein, 10 aa, synthetic construct
EWPRGDFNNL

SEQ ID NO: 153064 - protein, 10 aa, synthetic construct
EWRRGDFNNL

SEQ ID NO: 153065 - protein, 10 aa, synthetic construct
EWVRGDFNNL

SEQ ID NO: 153066 - protein, 10 aa, synthetic construct
EWWRGDFNNL

SEQ ID NO: 153067 - protein, 10 aa, synthetic construct
EWYRGDFNNL

SEQ ID NO: 153068 - protein, 10 aa, synthetic construct
EYARGDFNNL

SEQ ID NO: 153069 - protein, 10 aa, synthetic construct
EYDRGDFNNL

SEQ ID NO: 153070 - protein, 10 aa, synthetic construct
EYERGDFNNL

SEQ ID NO: 153071 - protein, 10 aa, synthetic construct
EYNRGDFNNL

SEQ ID NO: 153072 - protein, 10 aa, synthetic construct
EYQRGDFNNL

SEQ ID NO: 153073 - protein, 10 aa, synthetic construct
EYSRGDFNNL

SEQ ID NO: 153074 - protein, 10 aa, synthetic construct
EYTRGDFNNL

SEQ ID NO: 153075 - protein, 10 aa, synthetic construct
EYFRGDFNNL

SEQ ID NO: 153076 - protein, 10 aa, synthetic construct
EYGRGDFNNL

SEQ ID NO: 153077 - protein, 10 aa, synthetic construct
EYHRGDFNNL

SEQ ID NO: 153078 - protein, 10 aa, synthetic construct
EYIRGDFNNL

SEQ ID NO: 153079 - protein, 10 aa, synthetic construct
EYKRGDFNNL

SEQ ID NO: 153080 - protein, 10 aa, synthetic construct
EYLRGDFNNL

SEQ ID NO: 153081 - protein, 10 aa, synthetic construct
EYMRGDFNNL

SEQ ID NO: 153082 - protein, 10 aa, synthetic construct
EYPRGDFNNL

SEQ ID NO: 153083 - protein, 10 aa, synthetic construct
EYRRGDFNNL

SEQ ID NO: 153084 - protein, 10 aa, synthetic construct
EYVRGDFNNL

SEQ ID NO: 153085 - protein, 10 aa, synthetic construct
EYWRGDFNNL

SEQ ID NO: 153086 - protein, 10 aa, synthetic construct
EYYRGDFNNL

SEQ ID NO: 153087 - protein, 10 aa, synthetic construct
NAARGDFNNL

SEQ ID NO: 153088 - protein, 10 aa, synthetic construct
NADRGDFNNL

SEQ ID NO: 153089 - protein, 10 aa, synthetic construct
NAERGDFNNL

SEQ ID NO: 153090 - protein, 10 aa, synthetic construct
NANRGDFNNL

SEQ ID NO: 153091 - protein, 10 aa, synthetic construct
NAQRGDFNNL

SEQ ID NO: 153092 - protein, 10 aa, synthetic construct
NASRGDFNNL

SEQ ID NO: 153093 - protein, 10 aa, synthetic construct
NATRGDFNNL

SEQ ID NO: 153094 - protein, 10 aa, synthetic construct
NAFRGDFNNL

SEQ ID NO: 153095 - protein, 10 aa, synthetic construct
NAGRGDFNNL

SEQ ID NO: 153096 - protein, 10 aa, synthetic construct
NAHRGDFNNL

SEQ ID NO: 153097 - protein, 10 aa, synthetic construct
NAIRGDFNNL

SEQ ID NO: 153098 - protein, 10 aa, synthetic construct
NAKRGDFNNL

SEQ ID NO: 153099 - protein, 10 aa, synthetic construct
NALRGDFNNL

SEQ ID NO: 153100 - protein, 10 aa, synthetic construct
NAMRGDFNNL

SEQ ID NO: 153101 - protein, 10 aa, synthetic construct
NAPRGDFNNL

SEQ ID NO: 153102 - protein, 10 aa, synthetic construct
NARRGDFNNL

SEQ ID NO: 153103 - protein, 10 aa, synthetic construct
NAVRGDFNNL

SEQ ID NO: 153104 - protein, 10 aa, synthetic construct
NAWRGDFNNL

SEQ ID NO: 153105 - protein, 10 aa, synthetic construct
NAYRGDFNNL

SEQ ID NO: 153106 - protein, 10 aa, synthetic construct
NDARGDFNNL

SEQ ID NO: 153107 - protein, 10 aa, synthetic construct
NDDRGDFNNL

SEQ ID NO: 153108 - protein, 10 aa, synthetic construct
NDERGDFNNL

SEQ ID NO: 153109 - protein, 10 aa, synthetic construct
NDNRGDFNNL

SEQ ID NO: 153110 - protein, 10 aa, synthetic construct
NDQRGDFNNL

SEQ ID NO: 153111 - protein, 10 aa, synthetic construct
NDSRGDFNNL

SEQ ID NO: 153112 - protein, 10 aa, synthetic construct
NDTRGDFNNL

SEQ ID NO: 153113 - protein, 10 aa, synthetic construct
NDFRGDFNNL

SEQ ID NO: 153114 - protein, 10 aa, synthetic construct
NDGRGDFNNL

SEQ ID NO: 153115 - protein, 10 aa, synthetic construct
NDHRGDFNNL

SEQ ID NO: 153116 - protein, 10 aa, synthetic construct
NDIRGDFNNL

SEQ ID NO: 153117 - protein, 10 aa, synthetic construct
NDKRGDFNNL

SEQ ID NO: 153118 - protein, 10 aa, synthetic construct
NDLRGDFNNL

SEQ ID NO: 153119 - protein, 10 aa, synthetic construct
NDMRGDFNNL

SEQ ID NO: 153120 - protein, 10 aa, synthetic construct
NDPRGDFNNL

SEQ ID NO: 153121 - protein, 10 aa, synthetic construct
NDRRGDFNNL

SEQ ID NO: 153122 - protein, 10 aa, synthetic construct
NDVRGDFNNL

SEQ ID NO: 153123 - protein, 10 aa, synthetic construct
NDWRGDFNNL

SEQ ID NO: 153124 - protein, 10 aa, synthetic construct
NDYRGDFNNL

SEQ ID NO: 153125 - protein, 10 aa, synthetic construct
NEARGDFNNL

SEQ ID NO: 153126 - protein, 10 aa, synthetic construct
NEDRGDFNNL

SEQ ID NO: 153127 - protein, 10 aa, synthetic construct
NEERGDFNNL

SEQ ID NO: 153128 - protein, 10 aa, synthetic construct
NENRGDFNNL

SEQ ID NO: 153129 - protein, 10 aa, synthetic construct
NEQRGDFNNL

SEQ ID NO: 153130 - protein, 10 aa, synthetic construct
NESRGDFNNL

SEQ ID NO: 153131 - protein, 10 aa, synthetic construct
NETRGDFNNL

SEQ ID NO: 153132 - protein, 10 aa, synthetic construct
NEFRGDFNNL

SEQ ID NO: 153133 - protein, 10 aa, synthetic construct
NEGRGDFNNL

SEQ ID NO: 153134 - protein, 10 aa, synthetic construct
NEHRGDFNNL

SEQ ID NO: 153135 - protein, 10 aa, synthetic construct
NEIRGDFNNL

SEQ ID NO: 153136 - protein, 10 aa, synthetic construct
NEKRGDFNNL

SEQ ID NO: 153137 - protein, 10 aa, synthetic construct
NELRGDFNNL

SEQ ID NO: 153138 - protein, 10 aa, synthetic construct
NEMRGDFNNL

SEQ ID NO: 153139 - protein, 10 aa, synthetic construct
NEPRGDFNNL

SEQ ID NO: 153140 - protein, 10 aa, synthetic construct
NERRGDFNNL

SEQ ID NO: 153141 - protein, 10 aa, synthetic construct
NEVRGDFNNL

SEQ ID NO: 153142 - protein, 10 aa, synthetic construct
NEWRGDFNNL

SEQ ID NO: 153143 - protein, 10 aa, synthetic construct
NEYRGDFNNL

SEQ ID NO: 153144 - protein, 10 aa, synthetic construct
NNARGDFNNL

SEQ ID NO: 153145 - protein, 10 aa, synthetic construct
NNDRGDFNNL

SEQ ID NO: 153146 - protein, 10 aa, synthetic construct
NNERGDFNNL

SEQ ID NO: 153147 - protein, 10 aa, synthetic construct
NNNRGDFNNL

SEQ ID NO: 153148 - protein, 10 aa, synthetic construct
NNQRGDFNNL

SEQ ID NO: 153149 - protein, 10 aa, synthetic construct
NNSRGDFNNL

SEQ ID NO: 153150 - protein, 10 aa, synthetic construct
NNTRGDFNNL

SEQ ID NO: 153151 - protein, 10 aa, synthetic construct
NNFRGDFNNL

SEQ ID NO: 153152 - protein, 10 aa, synthetic construct
NNGRGDFNNL

SEQ ID NO: 153153 - protein, 10 aa, synthetic construct
NNHRGDFNNL

SEQ ID NO: 153154 - protein, 10 aa, synthetic construct
NNIRGDFNNL

SEQ ID NO: 153155 - protein, 10 aa, synthetic construct
NNKRGDFNNL

SEQ ID NO: 153156 - protein, 10 aa, synthetic construct
NNLRGDFNNL

SEQ ID NO: 153157 - protein, 10 aa, synthetic construct
NNMRGDFNNL

SEQ ID NO: 153158 - protein, 10 aa, synthetic construct
NNPRGDFNNL

SEQ ID NO: 153159 - protein, 10 aa, synthetic construct
NNRRGDFNNL

SEQ ID NO: 153160 - protein, 10 aa, synthetic construct
NNVRGDFNNL

SEQ ID NO: 153161 - protein, 10 aa, synthetic construct
NNWRGDFNNL

SEQ ID NO: 153162 - protein, 10 aa, synthetic construct
NNYRGDFNNL

SEQ ID NO: 153163 - protein, 10 aa, synthetic construct
NQARGDFNNL

SEQ ID NO: 153164 - protein, 10 aa, synthetic construct
NQDRGDFNNL

SEQ ID NO: 153165 - protein, 10 aa, synthetic construct
NQERGDFNNL

SEQ ID NO: 153166 - protein, 10 aa, synthetic construct
NQNRGDFNNL

SEQ ID NO: 153167 - protein, 10 aa, synthetic construct
NQQRGDFNNL

SEQ ID NO: 153168 - protein, 10 aa, synthetic construct
NQSRGDFNNL

SEQ ID NO: 153169 - protein, 10 aa, synthetic construct
NQTRGDFNNL

SEQ ID NO: 153170 - protein, 10 aa, synthetic construct
NQFRGDFNNL

SEQ ID NO: 153171 - protein, 10 aa, synthetic construct
NQGRGDFNNL

SEQ ID NO: 153172 - protein, 10 aa, synthetic construct
NQHRGDFNNL

SEQ ID NO: 153173 - protein, 10 aa, synthetic construct
NQIRGDFNNL

SEQ ID NO: 153174 - protein, 10 aa, synthetic construct
NQKRGDFNNL

SEQ ID NO: 153175 - protein, 10 aa, synthetic construct
NQLRGDFNNL

SEQ ID NO: 153176 - protein, 10 aa, synthetic construct
NQMRGDFNNL

SEQ ID NO: 153177 - protein, 10 aa, synthetic construct
NQPRGDFNNL

SEQ ID NO: 153178 - protein, 10 aa, synthetic construct
NQRRGDFNNL

SEQ ID NO: 153179 - protein, 10 aa, synthetic construct
NQVRGDFNNL

SEQ ID NO: 153180 - protein, 10 aa, synthetic construct
NQWRGDFNNL

SEQ ID NO: 153181 - protein, 10 aa, synthetic construct
NQYRGDFNNL

SEQ ID NO: 153182 - protein, 10 aa, synthetic construct
NSARGDFNNL

SEQ ID NO: 153183 - protein, 10 aa, synthetic construct
NSDRGDFNNL

SEQ ID NO: 153184 - protein, 10 aa, synthetic construct
NSERGDFNNL

SEQ ID NO: 153185 - protein, 10 aa, synthetic construct
NSNRGDFNNL

SEQ ID NO: 153186 - protein, 10 aa, synthetic construct
NSQRGDFNNL

SEQ ID NO: 153187 - protein, 10 aa, synthetic construct
NSSRGDFNNL

SEQ ID NO: 153188 - protein, 10 aa, synthetic construct
NSTRGDFNNL

SEQ ID NO: 153189 - protein, 10 aa, synthetic construct
NSFRGDFNNL

SEQ ID NO: 153190 - protein, 10 aa, synthetic construct
NSGRGDFNNL

SEQ ID NO: 153191 - protein, 10 aa, synthetic construct
NSHRGDFNNL

SEQ ID NO: 153192 - protein, 10 aa, synthetic construct
NSIRGDFNNL

SEQ ID NO: 153193 - protein, 10 aa, synthetic construct
NSKRGDFNNL

SEQ ID NO: 153194 - protein, 10 aa, synthetic construct
NSLRGDFNNL

SEQ ID NO: 153195 - protein, 10 aa, synthetic construct
NSMRGDFNNL

SEQ ID NO: 153196 - protein, 10 aa, synthetic construct
NSPRGDFNNL

SEQ ID NO: 153197 - protein, 10 aa, synthetic construct
NSRRGDFNNL

SEQ ID NO: 153198 - protein, 10 aa, synthetic construct
NSVRGDFNNL

SEQ ID NO: 153199 - protein, 10 aa, synthetic construct
NSWRGDFNNL

SEQ ID NO: 153200 - protein, 10 aa, synthetic construct
NSYRGDFNNL

SEQ ID NO: 153201 - protein, 10 aa, synthetic construct
NTARGDFNNL

SEQ ID NO: 153202 - protein, 10 aa, synthetic construct
NTDRGDFNNL

SEQ ID NO: 153203 - protein, 10 aa, synthetic construct
NTERGDFNNL

SEQ ID NO: 153204 - protein, 10 aa, synthetic construct
NTNRGDFNNL

SEQ ID NO: 153205 - protein, 10 aa, synthetic construct
NTQRGDFNNL

SEQ ID NO: 153206 - protein, 10 aa, synthetic construct
NTSRGDFNNL

SEQ ID NO: 153207 - protein, 10 aa, synthetic construct
NTTRGDFNNL

SEQ ID NO: 153208 - protein, 10 aa, synthetic construct
NTFRGDFNNL

SEQ ID NO: 153209 - protein, 10 aa, synthetic construct
NTGRGDFNNL

SEQ ID NO: 153210 - protein, 10 aa, synthetic construct
NTHRGDFNNL

SEQ ID NO: 153211 - protein, 10 aa, synthetic construct
NTIRGDFNNL

SEQ ID NO: 153212 - protein, 10 aa, synthetic construct
NTKRGDFNNL

SEQ ID NO: 153213 - protein, 10 aa, synthetic construct
NTLRGDFNNL

SEQ ID NO: 153214 - protein, 10 aa, synthetic construct
NTMRGDFNNL

SEQ ID NO: 153215 - protein, 10 aa, synthetic construct
NTPRGDFNNL

SEQ ID NO: 153216 - protein, 10 aa, synthetic construct
NTRRGDFNNL

SEQ ID NO: 153217 - protein, 10 aa, synthetic construct
NTVRGDFNNL

SEQ ID NO: 153218 - protein, 10 aa, synthetic construct
NTWRGDFNNL

SEQ ID NO: 153219 - protein, 10 aa, synthetic construct
NTYRGDFNNL

SEQ ID NO: 153220 - protein, 10 aa, synthetic construct
NFARGDFNNL

SEQ ID NO: 153221 - protein, 10 aa, synthetic construct
NFDRGDFNNL

SEQ ID NO: 153222 - protein, 10 aa, synthetic construct
NFERGDFNNL

SEQ ID NO: 153223 - protein, 10 aa, synthetic construct
NFNRGDFNNL

SEQ ID NO: 153224 - protein, 10 aa, synthetic construct
NFQRGDFNNL

SEQ ID NO: 153225 - protein, 10 aa, synthetic construct
NFSRGDFNNL

SEQ ID NO: 153226 - protein, 10 aa, synthetic construct
NFTRGDFNNL

SEQ ID NO: 153227 - protein, 10 aa, synthetic construct
NFFRGDFNNL

SEQ ID NO: 153228 - protein, 10 aa, synthetic construct
NFGRGDFNNL

SEQ ID NO: 153229 - protein, 10 aa, synthetic construct
NFHRGDFNNL

SEQ ID NO: 153230 - protein, 10 aa, synthetic construct
NFIRGDFNNL

SEQ ID NO: 153231 - protein, 10 aa, synthetic construct
NFKRGDFNNL

SEQ ID NO: 153232 - protein, 10 aa, synthetic construct
NFLRGDFNNL

SEQ ID NO: 153233 - protein, 10 aa, synthetic construct
NFMRGDFNNL

SEQ ID NO: 153234 - protein, 10 aa, synthetic construct
NFPRGDFNNL

SEQ ID NO: 153235 - protein, 10 aa, synthetic construct
NFRRGDFNNL

SEQ ID NO: 153236 - protein, 10 aa, synthetic construct
NFVRGDFNNL

SEQ ID NO: 153237 - protein, 10 aa, synthetic construct
NFWRGDFNNL

SEQ ID NO: 153238 - protein, 10 aa, synthetic construct
NFYRGDFNNL

SEQ ID NO: 153239 - protein, 10 aa, synthetic construct
NGARGDFNNL

SEQ ID NO: 153240 - protein, 10 aa, synthetic construct
NGDRGDFNNL

SEQ ID NO: 153241 - protein, 10 aa, synthetic construct
NGERGDFNNL

SEQ ID NO: 153242 - protein, 10 aa, synthetic construct
NGNRGDFNNL

SEQ ID NO: 153243 - protein, 10 aa, synthetic construct
NGQRGDFNNL

SEQ ID NO: 153244 - protein, 10 aa, synthetic construct
NGSRGDFNNL

SEQ ID NO: 153245 - protein, 10 aa, synthetic construct
NGTRGDFNNL

SEQ ID NO: 153246 - protein, 10 aa, synthetic construct
NGFRGDFNNL

SEQ ID NO: 153247 - protein, 10 aa, synthetic construct
NGGRGDFNNL

SEQ ID NO: 153248 - protein, 10 aa, synthetic construct
NGHRGDFNNL

SEQ ID NO: 153249 - protein, 10 aa, synthetic construct
NGIRGDFNNL

SEQ ID NO: 153250 - protein, 10 aa, synthetic construct
NGKRGDFNNL

SEQ ID NO: 153251 - protein, 10 aa, synthetic construct
NGLRGDFNNL

SEQ ID NO: 153252 - protein, 10 aa, synthetic construct
NGMRGDFNNL

SEQ ID NO: 153253 - protein, 10 aa, synthetic construct
NGPRGDFNNL

SEQ ID NO: 153254 - protein, 10 aa, synthetic construct
NGRRGDFNNL

SEQ ID NO: 153255 - protein, 10 aa, synthetic construct
NGVRGDFNNL

SEQ ID NO: 153256 - protein, 10 aa, synthetic construct
NGWRGDFNNL

SEQ ID NO: 153257 - protein, 10 aa, synthetic construct
NGYRGDFNNL

SEQ ID NO: 153258 - protein, 10 aa, synthetic construct
NHARGDFNNL

SEQ ID NO: 153259 - protein, 10 aa, synthetic construct
NHDRGDFNNL

SEQ ID NO: 153260 - protein, 10 aa, synthetic construct
NHERGDFNNL

SEQ ID NO: 153261 - protein, 10 aa, synthetic construct
NHNRGDFNNL

SEQ ID NO: 153262 - protein, 10 aa, synthetic construct
NHQRGDFNNL

SEQ ID NO: 153263 - protein, 10 aa, synthetic construct
NHSRGDFNNL

SEQ ID NO: 153264 - protein, 10 aa, synthetic construct
NHTRGDFNNL

SEQ ID NO: 153265 - protein, 10 aa, synthetic construct
NHFRGDFNNL

SEQ ID NO: 153266 - protein, 10 aa, synthetic construct
NHGRGDFNNL

SEQ ID NO: 153267 - protein, 10 aa, synthetic construct
NHHRGDFNNL

SEQ ID NO: 153268 - protein, 10 aa, synthetic construct
NHIRGDFNNL

SEQ ID NO: 153269 - protein, 10 aa, synthetic construct
NHKRGDFNNL

SEQ ID NO: 153270 - protein, 10 aa, synthetic construct
NHLRGDFNNL

SEQ ID NO: 153271 - protein, 10 aa, synthetic construct
NHMRGDFNNL

SEQ ID NO: 153272 - protein, 10 aa, synthetic construct
NHPRGDFNNL

SEQ ID NO: 153273 - protein, 10 aa, synthetic construct
NHRRGDFNNL

SEQ ID NO: 153274 - protein, 10 aa, synthetic construct
NHVRGDFNNL

SEQ ID NO: 153275 - protein, 10 aa, synthetic construct
NHWRGDFNNL

SEQ ID NO: 153276 - protein, 10 aa, synthetic construct
NHYRGDFNNL

SEQ ID NO: 153277 - protein, 10 aa, synthetic construct
NIARGDFNNL

SEQ ID NO: 153278 - protein, 10 aa, synthetic construct
NIDRGDFNNL

SEQ ID NO: 153279 - protein, 10 aa, synthetic construct
NIERGDFNNL

SEQ ID NO: 153280 - protein, 10 aa, synthetic construct
NINRGDFNNL

SEQ ID NO: 153281 - protein, 10 aa, synthetic construct
NIQRGDFNNL

SEQ ID NO: 153282 - protein, 10 aa, synthetic construct
NISRGDFNNL

SEQ ID NO: 153283 - protein, 10 aa, synthetic construct
NITRGDFNNL

SEQ ID NO: 153284 - protein, 10 aa, synthetic construct
NIFRGDFNNL

SEQ ID NO: 153285 - protein, 10 aa, synthetic construct
NIGRGDFNNL

SEQ ID NO: 153286 - protein, 10 aa, synthetic construct
NIHRGDFNNL

SEQ ID NO: 153287 - protein, 10 aa, synthetic construct
NIIRGDFNNL

SEQ ID NO: 153288 - protein, 10 aa, synthetic construct
NIKRGDFNNL

SEQ ID NO: 153289 - protein, 10 aa, synthetic construct
NILRGDFNNL

SEQ ID NO: 153290 - protein, 10 aa, synthetic construct
NIMRGDFNNL

SEQ ID NO: 153291 - protein, 10 aa, synthetic construct
NIPRGDFNNL

SEQ ID NO: 153292 - protein, 10 aa, synthetic construct
NIRRGDFNNL

SEQ ID NO: 153293 - protein, 10 aa, synthetic construct
NIVRGDFNNL

SEQ ID NO: 153294 - protein, 10 aa, synthetic construct
NIWRGDFNNL

SEQ ID NO: 153295 - protein, 10 aa, synthetic construct
NIYRGDFNNL

SEQ ID NO: 153296 - protein, 10 aa, synthetic construct
NKARGDFNNL

SEQ ID NO: 153297 - protein, 10 aa, synthetic construct
NKDRGDFNNL

SEQ ID NO: 153298 - protein, 10 aa, synthetic construct
NKERGDFNNL

SEQ ID NO: 153299 - protein, 10 aa, synthetic construct
NKNRGDFNNL

SEQ ID NO: 153300 - protein, 10 aa, synthetic construct
NKQRGDFNNL

SEQ ID NO: 153301 - protein, 10 aa, synthetic construct
NKSRGDFNNL

SEQ ID NO: 153302 - protein, 10 aa, synthetic construct
NKTRGDFNNL

SEQ ID NO: 153303 - protein, 10 aa, synthetic construct
NKFRGDFNNL

SEQ ID NO: 153304 - protein, 10 aa, synthetic construct
NKGRGDFNNL

SEQ ID NO: 153305 - protein, 10 aa, synthetic construct
NKHRGDFNNL

SEQ ID NO: 153306 - protein, 10 aa, synthetic construct
NKIRGDFNNL

SEQ ID NO: 153307 - protein, 10 aa, synthetic construct
NKKRGDFNNL

SEQ ID NO: 153308 - protein, 10 aa, synthetic construct
NKLRGDFNNL

SEQ ID NO: 153309 - protein, 10 aa, synthetic construct
NKMRGDFNNL

SEQ ID NO: 153310 - protein, 10 aa, synthetic construct
NKPRGDFNNL

SEQ ID NO: 153311 - protein, 10 aa, synthetic construct
NKRRGDFNNL

SEQ ID NO: 153312 - protein, 10 aa, synthetic construct
NKVRGDFNNL

SEQ ID NO: 153313 - protein, 10 aa, synthetic construct
NKWRGDFNNL

SEQ ID NO: 153314 - protein, 10 aa, synthetic construct
NKYRGDFNNL

SEQ ID NO: 153315 - protein, 10 aa, synthetic construct
NLARGDFNNL

SEQ ID NO: 153316 - protein, 10 aa, synthetic construct
NLDRGDFNNL

SEQ ID NO: 153317 - protein, 10 aa, synthetic construct
NLERGDFNNL

SEQ ID NO: 153318 - protein, 10 aa, synthetic construct
NLNRGDFNNL

SEQ ID NO: 153319 - protein, 10 aa, synthetic construct
NLQRGDFNNL

SEQ ID NO: 153320 - protein, 10 aa, synthetic construct
NLSRGDFNNL

SEQ ID NO: 153321 - protein, 10 aa, synthetic construct
NLTRGDFNNL

SEQ ID NO: 153322 - protein, 10 aa, synthetic construct
NLFRGDFNNL

SEQ ID NO: 153323 - protein, 10 aa, synthetic construct
NLGRGDFNNL

SEQ ID NO: 153324 - protein, 10 aa, synthetic construct
NLHRGDFNNL

SEQ ID NO: 153325 - protein, 10 aa, synthetic construct
NLIRGDFNNL

SEQ ID NO: 153326 - protein, 10 aa, synthetic construct
NLKRGDFNNL

SEQ ID NO: 153327 - protein, 10 aa, synthetic construct
NLLRGDFNNL

SEQ ID NO: 153328 - protein, 10 aa, synthetic construct
NLMRGDFNNL

SEQ ID NO: 153329 - protein, 10 aa, synthetic construct
NLPRGDFNNL

SEQ ID NO: 153330 - protein, 10 aa, synthetic construct
NLRRGDFNNL

SEQ ID NO: 153331 - protein, 10 aa, synthetic construct
NLVRGDFNNL

SEQ ID NO: 153332 - protein, 10 aa, synthetic construct
NLWRGDFNNL

SEQ ID NO: 153333 - protein, 10 aa, synthetic construct
NLYRGDFNNL

SEQ ID NO: 153334 - protein, 10 aa, synthetic construct
NMARGDFNNL

SEQ ID NO: 153335 - protein, 10 aa, synthetic construct
NMDRGDFNNL

SEQ ID NO: 153336 - protein, 10 aa, synthetic construct
NMERGDFNNL

SEQ ID NO: 153337 - protein, 10 aa, synthetic construct
NMNRGDFNNL

SEQ ID NO: 153338 - protein, 10 aa, synthetic construct
NMQRGDFNNL

SEQ ID NO: 153339 - protein, 10 aa, synthetic construct
NMSRGDFNNL

SEQ ID NO: 153340 - protein, 10 aa, synthetic construct
NMTRGDFNNL

SEQ ID NO: 153341 - protein, 10 aa, synthetic construct
NMFRGDFNNL

SEQ ID NO: 153342 - protein, 10 aa, synthetic construct
NMGRGDFNNL

SEQ ID NO: 153343 - protein, 10 aa, synthetic construct
NMHRGDFNNL

SEQ ID NO: 153344 - protein, 10 aa, synthetic construct
NMIRGDFNNL

SEQ ID NO: 153345 - protein, 10 aa, synthetic construct
NMKRGDFNNL

SEQ ID NO: 153346 - protein, 10 aa, synthetic construct
NMLRGDFNNL

SEQ ID NO: 153347 - protein, 10 aa, synthetic construct
NMMRGDFNNL

SEQ ID NO: 153348 - protein, 10 aa, synthetic construct
NMPRGDFNNL

SEQ ID NO: 153349 - protein, 10 aa, synthetic construct
NMRRGDFNNL

SEQ ID NO: 153350 - protein, 10 aa, synthetic construct
NMVRGDFNNL

SEQ ID NO: 153351 - protein, 10 aa, synthetic construct
NMWRGDFNNL

SEQ ID NO: 153352 - protein, 10 aa, synthetic construct
NMYRGDFNNL

SEQ ID NO: 153353 - protein, 10 aa, synthetic construct
NPARGDFNNL

SEQ ID NO: 153354 - protein, 10 aa, synthetic construct
NPDRGDFNNL

SEQ ID NO: 153355 - protein, 10 aa, synthetic construct
NPERGDFNNL

SEQ ID NO: 153356 - protein, 10 aa, synthetic construct
NPNRGDFNNL

SEQ ID NO: 153357 - protein, 10 aa, synthetic construct
NPQRGDFNNL

SEQ ID NO: 153358 - protein, 10 aa, synthetic construct
NPSRGDFNNL

SEQ ID NO: 153359 - protein, 10 aa, synthetic construct
NPTRGDFNNL

SEQ ID NO: 153360 - protein, 10 aa, synthetic construct
NPFRGDFNNL

SEQ ID NO: 153361 - protein, 10 aa, synthetic construct
NPGRGDFNNL

SEQ ID NO: 153362 - protein, 10 aa, synthetic construct
NPHRGDFNNL

SEQ ID NO: 153363 - protein, 10 aa, synthetic construct
NPIRGDFNNL

SEQ ID NO: 153364 - protein, 10 aa, synthetic construct
NPKRGDFNNL

SEQ ID NO: 153365 - protein, 10 aa, synthetic construct
NPLRGDFNNL

SEQ ID NO: 153366 - protein, 10 aa, synthetic construct
NPMRGDFNNL

SEQ ID NO: 153367 - protein, 10 aa, synthetic construct
NPPRGDFNNL

SEQ ID NO: 153368 - protein, 10 aa, synthetic construct
NPRRGDFNNL

SEQ ID NO: 153369 - protein, 10 aa, synthetic construct
NPVRGDFNNL

SEQ ID NO: 153370 - protein, 10 aa, synthetic construct
NPWRGDFNNL

SEQ ID NO: 153371 - protein, 10 aa, synthetic construct
NPYRGDFNNL

SEQ ID NO: 153372 - protein, 10 aa, synthetic construct
NRARGDFNNL

SEQ ID NO: 153373 - protein, 10 aa, synthetic construct
NRDRGDFNNL

SEQ ID NO: 153374 - protein, 10 aa, synthetic construct
NRERGDFNNL

SEQ ID NO: 153375 - protein, 10 aa, synthetic construct
NRNRGDFNNL

SEQ ID NO: 153376 - protein, 10 aa, synthetic construct
NRQRGDFNNL

SEQ ID NO: 153377 - protein, 10 aa, synthetic construct
NRSRGDFNNL

SEQ ID NO: 153378 - protein, 10 aa, synthetic construct
NRTRGDFNNL

SEQ ID NO: 153379 - protein, 10 aa, synthetic construct
NRFRGDFNNL

SEQ ID NO: 153380 - protein, 10 aa, synthetic construct
NRGRGDFNNL

SEQ ID NO: 153381 - protein, 10 aa, synthetic construct
NRHRGDFNNL

SEQ ID NO: 153382 - protein, 10 aa, synthetic construct
NRIRGDFNNL

SEQ ID NO: 153383 - protein, 10 aa, synthetic construct
NRKRGDFNNL

SEQ ID NO: 153384 - protein, 10 aa, synthetic construct
NRLRGDFNNL

SEQ ID NO: 153385 - protein, 10 aa, synthetic construct
NRMRGDFNNL

SEQ ID NO: 153386 - protein, 10 aa, synthetic construct
NRPRGDFNNL

SEQ ID NO: 153387 - protein, 10 aa, synthetic construct
NRRRGDFNNL

SEQ ID NO: 153388 - protein, 10 aa, synthetic construct
NRVRGDFNNL

SEQ ID NO: 153389 - protein, 10 aa, synthetic construct
NRWRGDFNNL

SEQ ID NO: 153390 - protein, 10 aa, synthetic construct
NRYRGDFNNL

SEQ ID NO: 153391 - protein, 10 aa, synthetic construct
NVARGDFNNL

SEQ ID NO: 153392 - protein, 10 aa, synthetic construct
NVDRGDFNNL

SEQ ID NO: 153393 - protein, 10 aa, synthetic construct
NVERGDFNNL

SEQ ID NO: 153394 - protein, 10 aa, synthetic construct
NVNRGDFNNL

SEQ ID NO: 153395 - protein, 10 aa, synthetic construct
NVQRGDFNNL

SEQ ID NO: 153396 - protein, 10 aa, synthetic construct
NVSRGDFNNL

SEQ ID NO: 153397 - protein, 10 aa, synthetic construct
NVTRGDFNNL

SEQ ID NO: 153398 - protein, 10 aa, synthetic construct
NVFRGDFNNL

SEQ ID NO: 153399 - protein, 10 aa, synthetic construct
NVGRGDFNNL

SEQ ID NO: 153400 - protein, 10 aa, synthetic construct
NVHRGDFNNL

SEQ ID NO: 153401 - protein, 10 aa, synthetic construct
NVIRGDFNNL

SEQ ID NO: 153402 - protein, 10 aa, synthetic construct
NVKRGDFNNL

SEQ ID NO: 153403 - protein, 10 aa, synthetic construct
NVLRGDFNNL

SEQ ID NO: 153404 - protein, 10 aa, synthetic construct
NVMRGDFNNL

SEQ ID NO: 153405 - protein, 10 aa, synthetic construct
NVPRGDFNNL

SEQ ID NO: 153406 - protein, 10 aa, synthetic construct
NVRRGDFNNL

SEQ ID NO: 153407 - protein, 10 aa, synthetic construct
NVVRGDFNNL

SEQ ID NO: 153408 - protein, 10 aa, synthetic construct
NVWRGDFNNL

SEQ ID NO: 153409 - protein, 10 aa, synthetic construct
NVYRGDFNNL

SEQ ID NO: 153410 - protein, 10 aa, synthetic construct
NWARGDFNNL

SEQ ID NO: 153411 - protein, 10 aa, synthetic construct
NWDRGDFNNL

SEQ ID NO: 153412 - protein, 10 aa, synthetic construct
NWERGDFNNL

SEQ ID NO: 153413 - protein, 10 aa, synthetic construct
NWNRGDFNNL

SEQ ID NO: 153414 - protein, 10 aa, synthetic construct
NWQRGDFNNL

SEQ ID NO: 153415 - protein, 10 aa, synthetic construct
NWSRGDFNNL

SEQ ID NO: 153416 - protein, 10 aa, synthetic construct
NWTRGDFNNL

SEQ ID NO: 153417 - protein, 10 aa, synthetic construct
NWFRGDFNNL

SEQ ID NO: 153418 - protein, 10 aa, synthetic construct
NWGRGDFNNL

SEQ ID NO: 153419 - protein, 10 aa, synthetic construct
NWHRGDFNNL

SEQ ID NO: 153420 - protein, 10 aa, synthetic construct
NWIRGDFNNL

SEQ ID NO: 153421 - protein, 10 aa, synthetic construct
NWKRGDFNNL

SEQ ID NO: 153422 - protein, 10 aa, synthetic construct
NWLRGDFNNL

SEQ ID NO: 153423 - protein, 10 aa, synthetic construct
NWMRGDFNNL

SEQ ID NO: 153424 - protein, 10 aa, synthetic construct
NWPRGDFNNL

SEQ ID NO: 153425 - protein, 10 aa, synthetic construct
NWRRGDFNNL

SEQ ID NO: 153426 - protein, 10 aa, synthetic construct
NWVRGDFNNL

SEQ ID NO: 153427 - protein, 10 aa, synthetic construct
NWWRGDFNNL

SEQ ID NO: 153428 - protein, 10 aa, synthetic construct
NWYRGDFNNL

SEQ ID NO: 153429 - protein, 10 aa, synthetic construct
NYARGDFNNL

SEQ ID NO: 153430 - protein, 10 aa, synthetic construct
NYDRGDFNNL

SEQ ID NO: 153431 - protein, 10 aa, synthetic construct
NYERGDFNNL

SEQ ID NO: 153432 - protein, 10 aa, synthetic construct
NYNRGDFNNL

SEQ ID NO: 153433 - protein, 10 aa, synthetic construct
NYQRGDFNNL

SEQ ID NO: 153434 - protein, 10 aa, synthetic construct
NYSRGDFNNL

SEQ ID NO: 153435 - protein, 10 aa, synthetic construct
NYTRGDFNNL

SEQ ID NO: 153436 - protein, 10 aa, synthetic construct
NYFRGDFNNL

SEQ ID NO: 153437 - protein, 10 aa, synthetic construct
NYGRGDFNNL

SEQ ID NO: 153438 - protein, 10 aa, synthetic construct
NYHRGDFNNL

SEQ ID NO: 153439 - protein, 10 aa, synthetic construct
NYIRGDFNNL

SEQ ID NO: 153440 - protein, 10 aa, synthetic construct
NYKRGDFNNL

SEQ ID NO: 153441 - protein, 10 aa, synthetic construct
NYLRGDFNNL

SEQ ID NO: 153442 - protein, 10 aa, synthetic construct
NYMRGDFNNL

SEQ ID NO: 153443 - protein, 10 aa, synthetic construct
NYPRGDFNNL

SEQ ID NO: 153444 - protein, 10 aa, synthetic construct
NYRRGDFNNL

SEQ ID NO: 153445 - protein, 10 aa, synthetic construct
NYVRGDFNNL

SEQ ID NO: 153446 - protein, 10 aa, synthetic construct
NYWRGDFNNL

SEQ ID NO: 153447 - protein, 10 aa, synthetic construct
NYYRGDFNNL

SEQ ID NO: 153448 - protein, 10 aa, synthetic construct
QAARGDFNNL

SEQ ID NO: 153449 - protein, 10 aa, synthetic construct
QADRGDFNNL

SEQ ID NO: 153450 - protein, 10 aa, synthetic construct
QAERGDFNNL

SEQ ID NO: 153451 - protein, 10 aa, synthetic construct
QANRGDFNNL

SEQ ID NO: 153452 - protein, 10 aa, synthetic construct
QAQRGDFNNL

SEQ ID NO: 153453 - protein, 10 aa, synthetic construct
QASRGDFNNL

SEQ ID NO: 153454 - protein, 10 aa, synthetic construct
QATRGDFNNL

SEQ ID NO: 153455 - protein, 10 aa, synthetic construct
QAFRGDFNNL

SEQ ID NO: 153456 - protein, 10 aa, synthetic construct
QAGRGDFNNL

SEQ ID NO: 153457 - protein, 10 aa, synthetic construct
QAHRGDFNNL

SEQ ID NO: 153458 - protein, 10 aa, synthetic construct
QAIRGDFNNL

SEQ ID NO: 153459 - protein, 10 aa, synthetic construct
QAKRGDFNNL

SEQ ID NO: 153460 - protein, 10 aa, synthetic construct
QALRGDFNNL

SEQ ID NO: 153461 - protein, 10 aa, synthetic construct
QAMRGDFNNL

SEQ ID NO: 153462 - protein, 10 aa, synthetic construct
QAPRGDFNNL

SEQ ID NO: 153463 - protein, 10 aa, synthetic construct
QARRGDFNNL

SEQ ID NO: 153464 - protein, 10 aa, synthetic construct
QAVRGDFNNL

SEQ ID NO: 153465 - protein, 10 aa, synthetic construct
QAWRGDFNNL

SEQ ID NO: 153466 - protein, 10 aa, synthetic construct
QAYRGDFNNL

SEQ ID NO: 153467 - protein, 10 aa, synthetic construct
QDARGDFNNL

SEQ ID NO: 153468 - protein, 10 aa, synthetic construct
QDDRGDFNNL

SEQ ID NO: 153469 - protein, 10 aa, synthetic construct
QDERGDFNNL

SEQ ID NO: 153470 - protein, 10 aa, synthetic construct
QDNRGDFNNL

SEQ ID NO: 153471 - protein, 10 aa, synthetic construct
QDQRGDFNNL

SEQ ID NO: 153472 - protein, 10 aa, synthetic construct
QDSRGDFNNL

SEQ ID NO: 153473 - protein, 10 aa, synthetic construct
QDTRGDFNNL

SEQ ID NO: 153474 - protein, 10 aa, synthetic construct
QDFRGDFNNL

SEQ ID NO: 153475 - protein, 10 aa, synthetic construct
QDGRGDFNNL

SEQ ID NO: 153476 - protein, 10 aa, synthetic construct
QDHRGDFNNL

SEQ ID NO: 153477 - protein, 10 aa, synthetic construct
QDIRGDFNNL

SEQ ID NO: 153478 - protein, 10 aa, synthetic construct
QDKRGDFNNL

SEQ ID NO: 153479 - protein, 10 aa, synthetic construct
QDLRGDFNNL

SEQ ID NO: 153480 - protein, 10 aa, synthetic construct
QDMRGDFNNL

SEQ ID NO: 153481 - protein, 10 aa, synthetic construct
QDPRGDFNNL

SEQ ID NO: 153482 - protein, 10 aa, synthetic construct
QDRRGDFNNL

SEQ ID NO: 153483 - protein, 10 aa, synthetic construct
QDVRGDFNNL

SEQ ID NO: 153484 - protein, 10 aa, synthetic construct
QDWRGDFNNL

SEQ ID NO: 153485 - protein, 10 aa, synthetic construct
QDYRGDFNNL

SEQ ID NO: 153486 - protein, 10 aa, synthetic construct
QEARGDFNNL

SEQ ID NO: 153487 - protein, 10 aa, synthetic construct
QEDRGDFNNL

SEQ ID NO: 153488 - protein, 10 aa, synthetic construct
QEERGDFNNL

SEQ ID NO: 153489 - protein, 10 aa, synthetic construct
QENRGDFNNL

SEQ ID NO: 153490 - protein, 10 aa, synthetic construct
QEQRGDFNNL

SEQ ID NO: 153491 - protein, 10 aa, synthetic construct
QESRGDFNNL

SEQ ID NO: 153492 - protein, 10 aa, synthetic construct
QETRGDFNNL

SEQ ID NO: 153493 - protein, 10 aa, synthetic construct
QEFRGDFNNL

SEQ ID NO: 153494 - protein, 10 aa, synthetic construct
QEGRGDFNNL

SEQ ID NO: 153495 - protein, 10 aa, synthetic construct
QEHRGDFNNL

SEQ ID NO: 153496 - protein, 10 aa, synthetic construct
QEIRGDFNNL

SEQ ID NO: 153497 - protein, 10 aa, synthetic construct
QEKRGDFNNL

SEQ ID NO: 153498 - protein, 10 aa, synthetic construct
QELRGDFNNL

SEQ ID NO: 153499 - protein, 10 aa, synthetic construct
QEMRGDFNNL

SEQ ID NO: 153500 - protein, 10 aa, synthetic construct
QEPRGDFNNL

SEQ ID NO: 153501 - protein, 10 aa, synthetic construct
QERRGDFNNL

SEQ ID NO: 153502 - protein, 10 aa, synthetic construct
QEVRGDFNNL

SEQ ID NO: 153503 - protein, 10 aa, synthetic construct
QEWRGDFNNL

SEQ ID NO: 153504 - protein, 10 aa, synthetic construct
QEYRGDFNNL

SEQ ID NO: 153505 - protein, 10 aa, synthetic construct
QNARGDFNNL

SEQ ID NO: 153506 - protein, 10 aa, synthetic construct
QNDRGDFNNL

SEQ ID NO: 153507 - protein, 10 aa, synthetic construct
QNERGDFNNL

SEQ ID NO: 153508 - protein, 10 aa, synthetic construct
QNNRGDFNNL

SEQ ID NO: 153509 - protein, 10 aa, synthetic construct
QNQRGDFNNL

SEQ ID NO: 153510 - protein, 10 aa, synthetic construct
QNSRGDFNNL

SEQ ID NO: 153511 - protein, 10 aa, synthetic construct
QNTRGDFNNL

SEQ ID NO: 153512 - protein, 10 aa, synthetic construct
QNFRGDFNNL

SEQ ID NO: 153513 - protein, 10 aa, synthetic construct
QNGRGDFNNL

SEQ ID NO: 153514 - protein, 10 aa, synthetic construct
QNHRGDFNNL

SEQ ID NO: 153515 - protein, 10 aa, synthetic construct
QNIRGDFNNL

SEQ ID NO: 153516 - protein, 10 aa, synthetic construct
QNKRGDFNNL

SEQ ID NO: 153517 - protein, 10 aa, synthetic construct
QNLRGDFNNL

SEQ ID NO: 153518 - protein, 10 aa, synthetic construct
QNMRGDFNNL

SEQ ID NO: 153519 - protein, 10 aa, synthetic construct
QNPRGDFNNL

SEQ ID NO: 153520 - protein, 10 aa, synthetic construct
QNRRGDFNNL

SEQ ID NO: 153521 - protein, 10 aa, synthetic construct
QNVRGDFNNL

SEQ ID NO: 153522 - protein, 10 aa, synthetic construct
QNWRGDFNNL

SEQ ID NO: 153523 - protein, 10 aa, synthetic construct
QNYRGDFNNL

SEQ ID NO: 153524 - protein, 10 aa, synthetic construct
QQARGDFNNL

SEQ ID NO: 153525 - protein, 10 aa, synthetic construct
QQDRGDFNNL

SEQ ID NO: 153526 - protein, 10 aa, synthetic construct
QQERGDFNNL

SEQ ID NO: 153527 - protein, 10 aa, synthetic construct
QQNRGDFNNL

SEQ ID NO: 153528 - protein, 10 aa, synthetic construct
QQQRGDFNNL

SEQ ID NO: 153529 - protein, 10 aa, synthetic construct
QQSRGDFNNL

SEQ ID NO: 153530 - protein, 10 aa, synthetic construct
QQTRGDFNNL

SEQ ID NO: 153531 - protein, 10 aa, synthetic construct
QQFRGDFNNL

SEQ ID NO: 153532 - protein, 10 aa, synthetic construct
QQGRGDFNNL

SEQ ID NO: 153533 - protein, 10 aa, synthetic construct
QQHRGDFNNL

SEQ ID NO: 153534 - protein, 10 aa, synthetic construct
QQIRGDFNNL

SEQ ID NO: 153535 - protein, 10 aa, synthetic construct
QQKRGDFNNL

SEQ ID NO: 153536 - protein, 10 aa, synthetic construct
QQLRGDFNNL

SEQ ID NO: 153537 - protein, 10 aa, synthetic construct
QQMRGDFNNL

SEQ ID NO: 153538 - protein, 10 aa, synthetic construct
QQPRGDFNNL

SEQ ID NO: 153539 - protein, 10 aa, synthetic construct
QQRRGDFNNL

SEQ ID NO: 153540 - protein, 10 aa, synthetic construct
QQVRGDFNNL

SEQ ID NO: 153541 - protein, 10 aa, synthetic construct
QQWRGDFNNL

SEQ ID NO: 153542 - protein, 10 aa, synthetic construct
QQYRGDFNNL

SEQ ID NO: 153543 - protein, 10 aa, synthetic construct
QSARGDFNNL

SEQ ID NO: 153544 - protein, 10 aa, synthetic construct
QSDRGDFNNL

SEQ ID NO: 153545 - protein, 10 aa, synthetic construct
QSERGDFNNL

SEQ ID NO: 153546 - protein, 10 aa, synthetic construct
QSNRGDFNNL

SEQ ID NO: 153547 - protein, 10 aa, synthetic construct
QSQRGDFNNL

SEQ ID NO: 153548 - protein, 10 aa, synthetic construct
QSSRGDFNNL

SEQ ID NO: 153549 - protein, 10 aa, synthetic construct
QSTRGDFNNL

SEQ ID NO: 153550 - protein, 10 aa, synthetic construct
QSFRGDFNNL

SEQ ID NO: 153551 - protein, 10 aa, synthetic construct
QSGRGDFNNL

SEQ ID NO: 153552 - protein, 10 aa, synthetic construct
QSHRGDFNNL

SEQ ID NO: 153553 - protein, 10 aa, synthetic construct
QSIRGDFNNL

SEQ ID NO: 153554 - protein, 10 aa, synthetic construct
QSKRGDFNNL

SEQ ID NO: 153555 - protein, 10 aa, synthetic construct
QSLRGDFNNL

SEQ ID NO: 153556 - protein, 10 aa, synthetic construct
QSMRGDFNNL

SEQ ID NO: 153557 - protein, 10 aa, synthetic construct
QSPRGDFNNL

SEQ ID NO: 153558 - protein, 10 aa, synthetic construct
QSRRGDFNNL

SEQ ID NO: 153559 - protein, 10 aa, synthetic construct
QSVRGDFNNL

SEQ ID NO: 153560 - protein, 10 aa, synthetic construct
QSWRGDFNNL

SEQ ID NO: 153561 - protein, 10 aa, synthetic construct
QSYRGDFNNL

SEQ ID NO: 153562 - protein, 10 aa, synthetic construct
QTARGDFNNL

SEQ ID NO: 153563 - protein, 10 aa, synthetic construct
QTDRGDFNNL

SEQ ID NO: 153564 - protein, 10 aa, synthetic construct
QTERGDFNNL

SEQ ID NO: 153565 - protein, 10 aa, synthetic construct
QTNRGDFNNL

SEQ ID NO: 153566 - protein, 10 aa, synthetic construct
QTQRGDFNNL

SEQ ID NO: 153567 - protein, 10 aa, synthetic construct
QTSRGDFNNL

SEQ ID NO: 153568 - protein, 10 aa, synthetic construct
QTTRGDFNNL

SEQ ID NO: 153569 - protein, 10 aa, synthetic construct
QTFRGDFNNL

SEQ ID NO: 153570 - protein, 10 aa, synthetic construct
QTGRGDFNNL

SEQ ID NO: 153571 - protein, 10 aa, synthetic construct
QTHRGDFNNL

SEQ ID NO: 153572 - protein, 10 aa, synthetic construct
QTIRGDFNNL

SEQ ID NO: 153573 - protein, 10 aa, synthetic construct
QTKRGDFNNL

SEQ ID NO: 153574 - protein, 10 aa, synthetic construct
QTLRGDFNNL

SEQ ID NO: 153575 - protein, 10 aa, synthetic construct
QTMRGDFNNL

SEQ ID NO: 153576 - protein, 10 aa, synthetic construct
QTPRGDFNNL

SEQ ID NO: 153577 - protein, 10 aa, synthetic construct
QTRRGDFNNL

SEQ ID NO: 153578 - protein, 10 aa, synthetic construct
QTVRGDFNNL

SEQ ID NO: 153579 - protein, 10 aa, synthetic construct
QTWRGDFNNL

SEQ ID NO: 153580 - protein, 10 aa, synthetic construct
QTYRGDFNNL

SEQ ID NO: 153581 - protein, 10 aa, synthetic construct
QFARGDFNNL

SEQ ID NO: 153582 - protein, 10 aa, synthetic construct
QFDRGDFNNL

SEQ ID NO: 153583 - protein, 10 aa, synthetic construct
QFERGDFNNL

SEQ ID NO: 153584 - protein, 10 aa, synthetic construct
QFNRGDFNNL

SEQ ID NO: 153585 - protein, 10 aa, synthetic construct
QFQRGDFNNL

SEQ ID NO: 153586 - protein, 10 aa, synthetic construct
QFSRGDFNNL

SEQ ID NO: 153587 - protein, 10 aa, synthetic construct
QFTRGDFNNL

SEQ ID NO: 153588 - protein, 10 aa, synthetic construct
QFFRGDFNNL

SEQ ID NO: 153589 - protein, 10 aa, synthetic construct
QFGRGDFNNL

SEQ ID NO: 153590 - protein, 10 aa, synthetic construct
QFHRGDFNNL

SEQ ID NO: 153591 - protein, 10 aa, synthetic construct
QFIRGDFNNL

SEQ ID NO: 153592 - protein, 10 aa, synthetic construct
QFKRGDFNNL

SEQ ID NO: 153593 - protein, 10 aa, synthetic construct
QFLRGDFNNL

SEQ ID NO: 153594 - protein, 10 aa, synthetic construct
QFMRGDFNNL

SEQ ID NO: 153595 - protein, 10 aa, synthetic construct
QFPRGDFNNL

SEQ ID NO: 153596 - protein, 10 aa, synthetic construct
QFRRGDFNNL

SEQ ID NO: 153597 - protein, 10 aa, synthetic construct
QFVRGDFNNL

SEQ ID NO: 153598 - protein, 10 aa, synthetic construct
QFWRGDFNNL

SEQ ID NO: 153599 - protein, 10 aa, synthetic construct
QFYRGDFNNL

SEQ ID NO: 153600 - protein, 10 aa, synthetic construct
QGARGDFNNL

SEQ ID NO: 153601 - protein, 10 aa, synthetic construct
QGDRGDFNNL

SEQ ID NO: 153602 - protein, 10 aa, synthetic construct
QGERGDFNNL

SEQ ID NO: 153603 - protein, 10 aa, synthetic construct
QGNRGDFNNL

SEQ ID NO: 153604 - protein, 10 aa, synthetic construct
QGQRGDFNNL

SEQ ID NO: 153605 - protein, 10 aa, synthetic construct
QGSRGDFNNL

SEQ ID NO: 153606 - protein, 10 aa, synthetic construct
QGTRGDFNNL

SEQ ID NO: 153607 - protein, 10 aa, synthetic construct
QGFRGDFNNL

SEQ ID NO: 153608 - protein, 10 aa, synthetic construct
QGGRGDFNNL

SEQ ID NO: 153609 - protein, 10 aa, synthetic construct
QGHRGDFNNL

SEQ ID NO: 153610 - protein, 10 aa, synthetic construct
QGIRGDFNNL

SEQ ID NO: 153611 - protein, 10 aa, synthetic construct
QGKRGDFNNL

SEQ ID NO: 153612 - protein, 10 aa, synthetic construct
QGLRGDFNNL

SEQ ID NO: 153613 - protein, 10 aa, synthetic construct
QGMRGDFNNL

SEQ ID NO: 153614 - protein, 10 aa, synthetic construct
QGPRGDFNNL

SEQ ID NO: 153615 - protein, 10 aa, synthetic construct
QGRRGDFNNL

SEQ ID NO: 153616 - protein, 10 aa, synthetic construct
QGVRGDFNNL

SEQ ID NO: 153617 - protein, 10 aa, synthetic construct
QGWRGDFNNL

SEQ ID NO: 153618 - protein, 10 aa, synthetic construct
QGYRGDFNNL

SEQ ID NO: 153619 - protein, 10 aa, synthetic construct
QHARGDFNNL

SEQ ID NO: 153620 - protein, 10 aa, synthetic construct
QHDRGDFNNL

SEQ ID NO: 153621 - protein, 10 aa, synthetic construct
QHERGDFNNL

SEQ ID NO: 153622 - protein, 10 aa, synthetic construct
QHNRGDFNNL

SEQ ID NO: 153623 - protein, 10 aa, synthetic construct
QHQRGDFNNL

SEQ ID NO: 153624 - protein, 10 aa, synthetic construct
QHSRGDFNNL

SEQ ID NO: 153625 - protein, 10 aa, synthetic construct
QHTRGDFNNL

SEQ ID NO: 153626 - protein, 10 aa, synthetic construct
QHFRGDFNNL

SEQ ID NO: 153627 - protein, 10 aa, synthetic construct
QHGRGDFNNL

SEQ ID NO: 153628 - protein, 10 aa, synthetic construct
QHHRGDFNNL

SEQ ID NO: 153629 - protein, 10 aa, synthetic construct
QHIRGDFNNL

SEQ ID NO: 153630 - protein, 10 aa, synthetic construct
QHKRGDFNNL

SEQ ID NO: 153631 - protein, 10 aa, synthetic construct
QHLRGDFNNL

SEQ ID NO: 153632 - protein, 10 aa, synthetic construct
QHMRGDFNNL

SEQ ID NO: 153633 - protein, 10 aa, synthetic construct
QHPRGDFNNL

SEQ ID NO: 153634 - protein, 10 aa, synthetic construct
QHRRGDFNNL

SEQ ID NO: 153635 - protein, 10 aa, synthetic construct
QHVRGDFNNL

SEQ ID NO: 153636 - protein, 10 aa, synthetic construct
QHWRGDFNNL

SEQ ID NO: 153637 - protein, 10 aa, synthetic construct
QHYRGDFNNL

SEQ ID NO: 153638 - protein, 10 aa, synthetic construct
QIARGDFNNL

SEQ ID NO: 153639 - protein, 10 aa, synthetic construct
QIDRGDFNNL

SEQ ID NO: 153640 - protein, 10 aa, synthetic construct
QIERGDFNNL

SEQ ID NO: 153641 - protein, 10 aa, synthetic construct
QINRGDFNNL

SEQ ID NO: 153642 - protein, 10 aa, synthetic construct
QIQRGDFNNL

SEQ ID NO: 153643 - protein, 10 aa, synthetic construct
QISRGDFNNL

SEQ ID NO: 153644 - protein, 10 aa, synthetic construct
QITRGDFNNL

SEQ ID NO: 153645 - protein, 10 aa, synthetic construct
QIFRGDFNNL

SEQ ID NO: 153646 - protein, 10 aa, synthetic construct
QIGRGDFNNL

SEQ ID NO: 153647 - protein, 10 aa, synthetic construct
QIHRGDFNNL

SEQ ID NO: 153648 - protein, 10 aa, synthetic construct
QIIRGDFNNL

SEQ ID NO: 153649 - protein, 10 aa, synthetic construct
QIKRGDFNNL

SEQ ID NO: 153650 - protein, 10 aa, synthetic construct
QILRGDFNNL

SEQ ID NO: 153651 - protein, 10 aa, synthetic construct
QIMRGDFNNL

SEQ ID NO: 153652 - protein, 10 aa, synthetic construct
QIPRGDFNNL

SEQ ID NO: 153653 - protein, 10 aa, synthetic construct
QIRRGDFNNL

SEQ ID NO: 153654 - protein, 10 aa, synthetic construct
QIVRGDFNNL

SEQ ID NO: 153655 - protein, 10 aa, synthetic construct
QIWRGDFNNL

SEQ ID NO: 153656 - protein, 10 aa, synthetic construct
QIYRGDFNNL

SEQ ID NO: 153657 - protein, 10 aa, synthetic construct
QKARGDFNNL

SEQ ID NO: 153658 - protein, 10 aa, synthetic construct
QKDRGDFNNL

SEQ ID NO: 153659 - protein, 10 aa, synthetic construct
QKERGDFNNL

SEQ ID NO: 153660 - protein, 10 aa, synthetic construct
QKNRGDFNNL

SEQ ID NO: 153661 - protein, 10 aa, synthetic construct
QKQRGDFNNL

SEQ ID NO: 153662 - protein, 10 aa, synthetic construct
QKSRGDFNNL

SEQ ID NO: 153663 - protein, 10 aa, synthetic construct
QKTRGDFNNL

SEQ ID NO: 153664 - protein, 10 aa, synthetic construct
QKFRGDFNNL

SEQ ID NO: 153665 - protein, 10 aa, synthetic construct
QKGRGDFNNL

SEQ ID NO: 153666 - protein, 10 aa, synthetic construct
QKHRGDFNNL

SEQ ID NO: 153667 - protein, 10 aa, synthetic construct
QKIRGDFNNL

SEQ ID NO: 153668 - protein, 10 aa, synthetic construct
QKKRGDFNNL

SEQ ID NO: 153669 - protein, 10 aa, synthetic construct
QKLRGDFNNL

SEQ ID NO: 153670 - protein, 10 aa, synthetic construct
QKMRGDFNNL

SEQ ID NO: 153671 - protein, 10 aa, synthetic construct
QKPRGDFNNL

SEQ ID NO: 153672 - protein, 10 aa, synthetic construct
QKRRGDFNNL

SEQ ID NO: 153673 - protein, 10 aa, synthetic construct
QKVRGDFNNL

SEQ ID NO: 153674 - protein, 10 aa, synthetic construct
QKWRGDFNNL

SEQ ID NO: 153675 - protein, 10 aa, synthetic construct
QKYRGDFNNL

SEQ ID NO: 153676 - protein, 10 aa, synthetic construct
QLARGDFNNL

SEQ ID NO: 153677 - protein, 10 aa, synthetic construct
QLDRGDFNNL

SEQ ID NO: 153678 - protein, 10 aa, synthetic construct
QLERGDFNNL

SEQ ID NO: 153679 - protein, 10 aa, synthetic construct
QLNRGDFNNL

SEQ ID NO: 153680 - protein, 10 aa, synthetic construct
QLQRGDFNNL

SEQ ID NO: 153681 - protein, 10 aa, synthetic construct
QLSRGDFNNL

SEQ ID NO: 153682 - protein, 10 aa, synthetic construct
QLTRGDFNNL

SEQ ID NO: 153683 - protein, 10 aa, synthetic construct
QLFRGDFNNL

SEQ ID NO: 153684 - protein, 10 aa, synthetic construct
QLGRGDFNNL

SEQ ID NO: 153685 - protein, 10 aa, synthetic construct
QLHRGDFNNL

SEQ ID NO: 153686 - protein, 10 aa, synthetic construct
QLIRGDFNNL

SEQ ID NO: 153687 - protein, 10 aa, synthetic construct
QLKRGDFNNL

SEQ ID NO: 153688 - protein, 10 aa, synthetic construct
QLLRGDFNNL

SEQ ID NO: 153689 - protein, 10 aa, synthetic construct
QLMRGDFNNL

SEQ ID NO: 153690 - protein, 10 aa, synthetic construct
QLPRGDFNNL

SEQ ID NO: 153691 - protein, 10 aa, synthetic construct
QLRRGDFNNL

SEQ ID NO: 153692 - protein, 10 aa, synthetic construct
QLVRGDFNNL

SEQ ID NO: 153693 - protein, 10 aa, synthetic construct
QLWRGDFNNL

SEQ ID NO: 153694 - protein, 10 aa, synthetic construct
QLYRGDFNNL

SEQ ID NO: 153695 - protein, 10 aa, synthetic construct
QMARGDFNNL

SEQ ID NO: 153696 - protein, 10 aa, synthetic construct
QMDRGDFNNL

SEQ ID NO: 153697 - protein, 10 aa, synthetic construct
QMERGDFNNL

SEQ ID NO: 153698 - protein, 10 aa, synthetic construct
QMNRGDFNNL

SEQ ID NO: 153699 - protein, 10 aa, synthetic construct
QMQRGDFNNL

SEQ ID NO: 153700 - protein, 10 aa, synthetic construct
QMSRGDFNNL

SEQ ID NO: 153701 - protein, 10 aa, synthetic construct
QMTRGDFNNL

SEQ ID NO: 153702 - protein, 10 aa, synthetic construct
QMFRGDFNNL

SEQ ID NO: 153703 - protein, 10 aa, synthetic construct
QMGRGDFNNL

SEQ ID NO: 153704 - protein, 10 aa, synthetic construct
QMHRGDFNNL

SEQ ID NO: 153705 - protein, 10 aa, synthetic construct
QMIRGDFNNL

SEQ ID NO: 153706 - protein, 10 aa, synthetic construct
QMKRGDFNNL

SEQ ID NO: 153707 - protein, 10 aa, synthetic construct
QMLRGDFNNL

SEQ ID NO: 153708 - protein, 10 aa, synthetic construct
QMMRGDFNNL

SEQ ID NO: 153709 - protein, 10 aa, synthetic construct
QMPRGDFNNL

SEQ ID NO: 153710 - protein, 10 aa, synthetic construct
QMRRGDFNNL

SEQ ID NO: 153711 - protein, 10 aa, synthetic construct
QMVRGDFNNL

SEQ ID NO: 153712 - protein, 10 aa, synthetic construct
QMWRGDFNNL

SEQ ID NO: 153713 - protein, 10 aa, synthetic construct
QMYRGDFNNL

SEQ ID NO: 153714 - protein, 10 aa, synthetic construct
QPARGDFNNL

SEQ ID NO: 153715 - protein, 10 aa, synthetic construct
QPDRGDFNNL

SEQ ID NO: 153716 - protein, 10 aa, synthetic construct
QPERGDFNNL

SEQ ID NO: 153717 - protein, 10 aa, synthetic construct
QPNRGDFNNL

SEQ ID NO: 153718 - protein, 10 aa, synthetic construct
QPQRGDFNNL

SEQ ID NO: 153719 - protein, 10 aa, synthetic construct
QPSRGDFNNL

SEQ ID NO: 153720 - protein, 10 aa, synthetic construct
QPTRGDFNNL

SEQ ID NO: 153721 - protein, 10 aa, synthetic construct
QPFRGDFNNL

SEQ ID NO: 153722 - protein, 10 aa, synthetic construct
QPGRGDFNNL

SEQ ID NO: 153723 - protein, 10 aa, synthetic construct
QPHRGDFNNL

SEQ ID NO: 153724 - protein, 10 aa, synthetic construct
QPIRGDFNNL

SEQ ID NO: 153725 - protein, 10 aa, synthetic construct
QPKRGDFNNL

SEQ ID NO: 153726 - protein, 10 aa, synthetic construct
QPLRGDFNNL

SEQ ID NO: 153727 - protein, 10 aa, synthetic construct
QPMRGDFNNL

SEQ ID NO: 153728 - protein, 10 aa, synthetic construct
QPPRGDFNNL

SEQ ID NO: 153729 - protein, 10 aa, synthetic construct
QPRRGDFNNL

SEQ ID NO: 153730 - protein, 10 aa, synthetic construct
QPVRGDFNNL

SEQ ID NO: 153731 - protein, 10 aa, synthetic construct
QPWRGDFNNL

SEQ ID NO: 153732 - protein, 10 aa, synthetic construct
QPYRGDFNNL

SEQ ID NO: 153733 - protein, 10 aa, synthetic construct
QRARGDFNNL

SEQ ID NO: 153734 - protein, 10 aa, synthetic construct
QRDRGDFNNL

SEQ ID NO: 153735 - protein, 10 aa, synthetic construct
QRERGDFNNL

SEQ ID NO: 153736 - protein, 10 aa, synthetic construct
QRNRGDFNNL

SEQ ID NO: 153737 - protein, 10 aa, synthetic construct
QRQRGDFNNL

SEQ ID NO: 153738 - protein, 10 aa, synthetic construct
QRSRGDFNNL

SEQ ID NO: 153739 - protein, 10 aa, synthetic construct
QRTRGDFNNL

SEQ ID NO: 153740 - protein, 10 aa, synthetic construct
QRFRGDFNNL

SEQ ID NO: 153741 - protein, 10 aa, synthetic construct
QRGRGDFNNL

SEQ ID NO: 153742 - protein, 10 aa, synthetic construct
QRHRGDFNNL

SEQ ID NO: 153743 - protein, 10 aa, synthetic construct
QRIRGDFNNL

SEQ ID NO: 153744 - protein, 10 aa, synthetic construct
QRKRGDFNNL

SEQ ID NO: 153745 - protein, 10 aa, synthetic construct
QRLRGDFNNL

SEQ ID NO: 153746 - protein, 10 aa, synthetic construct
QRMRGDFNNL

SEQ ID NO: 153747 - protein, 10 aa, synthetic construct
QRPRGDFNNL

SEQ ID NO: 153748 - protein, 10 aa, synthetic construct
QRRRGDFNNL

SEQ ID NO: 153749 - protein, 10 aa, synthetic construct
QRVRGDFNNL

SEQ ID NO: 153750 - protein, 10 aa, synthetic construct
QRWRGDFNNL

SEQ ID NO: 153751 - protein, 10 aa, synthetic construct
QRYRGDFNNL

SEQ ID NO: 153752 - protein, 10 aa, synthetic construct
QVARGDFNNL

SEQ ID NO: 153753 - protein, 10 aa, synthetic construct
QVDRGDFNNL

SEQ ID NO: 153754 - protein, 10 aa, synthetic construct
QVERGDFNNL

SEQ ID NO: 153755 - protein, 10 aa, synthetic construct
QVNRGDFNNL

SEQ ID NO: 153756 - protein, 10 aa, synthetic construct
QVQRGDFNNL

SEQ ID NO: 153757 - protein, 10 aa, synthetic construct
QVSRGDFNNL

SEQ ID NO: 153758 - protein, 10 aa, synthetic construct
QVTRGDFNNL

SEQ ID NO: 153759 - protein, 10 aa, synthetic construct
QVFRGDFNNL

SEQ ID NO: 153760 - protein, 10 aa, synthetic construct
QVGRGDFNNL

SEQ ID NO: 153761 - protein, 10 aa, synthetic construct
QVHRGDFNNL

SEQ ID NO: 153762 - protein, 10 aa, synthetic construct
QVIRGDFNNL

SEQ ID NO: 153763 - protein, 10 aa, synthetic construct
QVKRGDFNNL

SEQ ID NO: 153764 - protein, 10 aa, synthetic construct
QVLRGDFNNL

SEQ ID NO: 153765 - protein, 10 aa, synthetic construct
QVMRGDFNNL

SEQ ID NO: 153766 - protein, 10 aa, synthetic construct
QVPRGDFNNL

SEQ ID NO: 153767 - protein, 10 aa, synthetic construct
QVRRGDFNNL

SEQ ID NO: 153768 - protein, 10 aa, synthetic construct
QVVRGDFNNL

SEQ ID NO: 153769 - protein, 10 aa, synthetic construct
QVWRGDFNNL

SEQ ID NO: 153770 - protein, 10 aa, synthetic construct
QVYRGDFNNL

SEQ ID NO: 153771 - protein, 10 aa, synthetic construct
QWARGDFNNL

SEQ ID NO: 153772 - protein, 10 aa, synthetic construct
QWDRGDFNNL

SEQ ID NO: 153773 - protein, 10 aa, synthetic construct
QWERGDFNNL

SEQ ID NO: 153774 - protein, 10 aa, synthetic construct
QWNRGDFNNL

SEQ ID NO: 153775 - protein, 10 aa, synthetic construct
QWQRGDFNNL

SEQ ID NO: 153776 - protein, 10 aa, synthetic construct
QWSRGDFNNL

SEQ ID NO: 153777 - protein, 10 aa, synthetic construct
QWTRGDFNNL

SEQ ID NO: 153778 - protein, 10 aa, synthetic construct
QWFRGDFNNL

SEQ ID NO: 153779 - protein, 10 aa, synthetic construct
QWGRGDFNNL

SEQ ID NO: 153780 - protein, 10 aa, synthetic construct
QWHRGDFNNL

SEQ ID NO: 153781 - protein, 10 aa, synthetic construct
QWIRGDFNNL

SEQ ID NO: 153782 - protein, 10 aa, synthetic construct
QWKRGDFNNL

SEQ ID NO: 153783 - protein, 10 aa, synthetic construct
QWLRGDFNNL

SEQ ID NO: 153784 - protein, 10 aa, synthetic construct
QWMRGDFNNL

SEQ ID NO: 153785 - protein, 10 aa, synthetic construct
QWPRGDFNNL

SEQ ID NO: 153786 - protein, 10 aa, synthetic construct
QWRRGDFNNL

SEQ ID NO: 153787 - protein, 10 aa, synthetic construct
QWVRGDFNNL

SEQ ID NO: 153788 - protein, 10 aa, synthetic construct
QWWRGDFNNL

SEQ ID NO: 153789 - protein, 10 aa, synthetic construct
QWYRGDFNNL

SEQ ID NO: 153790 - protein, 10 aa, synthetic construct
QYARGDFNNL

SEQ ID NO: 153791 - protein, 10 aa, synthetic construct
QYDRGDFNNL

SEQ ID NO: 153792 - protein, 10 aa, synthetic construct
QYERGDFNNL

SEQ ID NO: 153793 - protein, 10 aa, synthetic construct
QYNRGDFNNL

SEQ ID NO: 153794 - protein, 10 aa, synthetic construct
QYQRGDFNNL

SEQ ID NO: 153795 - protein, 10 aa, synthetic construct
QYSRGDFNNL

SEQ ID NO: 153796 - protein, 10 aa, synthetic construct
QYTRGDFNNL

SEQ ID NO: 153797 - protein, 10 aa, synthetic construct
QYFRGDFNNL

SEQ ID NO: 153798 - protein, 10 aa, synthetic construct
QYGRGDFNNL

SEQ ID NO: 153799 - protein, 10 aa, synthetic construct
QYHRGDFNNL

SEQ ID NO: 153800 - protein, 10 aa, synthetic construct
QYIRGDFNNL

SEQ ID NO: 153801 - protein, 10 aa, synthetic construct
QYKRGDFNNL

SEQ ID NO: 153802 - protein, 10 aa, synthetic construct
QYLRGDFNNL

SEQ ID NO: 153803 - protein, 10 aa, synthetic construct
QYMRGDFNNL

SEQ ID NO: 153804 - protein, 10 aa, synthetic construct
QYPRGDFNNL

SEQ ID NO: 153805 - protein, 10 aa, synthetic construct
QYRRGDFNNL

SEQ ID NO: 153806 - protein, 10 aa, synthetic construct
QYVRGDFNNL

SEQ ID NO: 153807 - protein, 10 aa, synthetic construct
QYWRGDFNNL

SEQ ID NO: 153808 - protein, 10 aa, synthetic construct
QYYRGDFNNL

SEQ ID NO: 153809 - protein, 10 aa, synthetic construct
SAARGDFNNL

SEQ ID NO: 153810 - protein, 10 aa, synthetic construct
SADRGDFNNL

SEQ ID NO: 153811 - protein, 10 aa, synthetic construct
SAERGDFNNL

SEQ ID NO: 153812 - protein, 10 aa, synthetic construct
SANRGDFNNL

SEQ ID NO: 153813 - protein, 10 aa, synthetic construct
SAQRGDFNNL

SEQ ID NO: 153814 - protein, 10 aa, synthetic construct
SASRGDFNNL

SEQ ID NO: 153815 - protein, 10 aa, synthetic construct
SATRGDFNNL

SEQ ID NO: 153816 - protein, 10 aa, synthetic construct
SAFRGDFNNL

SEQ ID NO: 153817 - protein, 10 aa, synthetic construct
SAGRGDFNNL

SEQ ID NO: 153818 - protein, 10 aa, synthetic construct
SAHRGDFNNL

SEQ ID NO: 153819 - protein, 10 aa, synthetic construct
SAIRGDFNNL

SEQ ID NO: 153820 - protein, 10 aa, synthetic construct
SAKRGDFNNL

SEQ ID NO: 153821 - protein, 10 aa, synthetic construct
SALRGDFNNL

SEQ ID NO: 153822 - protein, 10 aa, synthetic construct
SAMRGDFNNL

SEQ ID NO: 153823 - protein, 10 aa, synthetic construct
SAPRGDFNNL

SEQ ID NO: 153824 - protein, 10 aa, synthetic construct
SARRGDFNNL

SEQ ID NO: 153825 - protein, 10 aa, synthetic construct
SAVRGDFNNL

SEQ ID NO: 153826 - protein, 10 aa, synthetic construct
SAWRGDFNNL

SEQ ID NO: 153827 - protein, 10 aa, synthetic construct
SAYRGDFNNL

SEQ ID NO: 153828 - protein, 10 aa, synthetic construct
SDARGDFNNL

SEQ ID NO: 153829 - protein, 10 aa, synthetic construct
SDDRGDFNNL

SEQ ID NO: 153830 - protein, 10 aa, synthetic construct
SDERGDFNNL

SEQ ID NO: 153831 - protein, 10 aa, synthetic construct
SDNRGDFNNL

SEQ ID NO: 153832 - protein, 10 aa, synthetic construct
SDQRGDFNNL

SEQ ID NO: 153833 - protein, 10 aa, synthetic construct
SDSRGDFNNL

SEQ ID NO: 153834 - protein, 10 aa, synthetic construct
SDTRGDFNNL

SEQ ID NO: 153835 - protein, 10 aa, synthetic construct
SDFRGDFNNL

SEQ ID NO: 153836 - protein, 10 aa, synthetic construct
SDGRGDFNNL

SEQ ID NO: 153837 - protein, 10 aa, synthetic construct
SDHRGDFNNL

SEQ ID NO: 153838 - protein, 10 aa, synthetic construct
SDIRGDFNNL

SEQ ID NO: 153839 - protein, 10 aa, synthetic construct
SDKRGDFNNL

SEQ ID NO: 153840 - protein, 10 aa, synthetic construct
SDLRGDFNNL

SEQ ID NO: 153841 - protein, 10 aa, synthetic construct
SDMRGDFNNL

SEQ ID NO: 153842 - protein, 10 aa, synthetic construct
SDPRGDFNNL

SEQ ID NO: 153843 - protein, 10 aa, synthetic construct
SDRRGDFNNL

SEQ ID NO: 153844 - protein, 10 aa, synthetic construct
SDVRGDFNNL

SEQ ID NO: 153845 - protein, 10 aa, synthetic construct
SDWRGDFNNL

SEQ ID NO: 153846 - protein, 10 aa, synthetic construct
SDYRGDFNNL

SEQ ID NO: 153847 - protein, 10 aa, synthetic construct
SEARGDFNNL

SEQ ID NO: 153848 - protein, 10 aa, synthetic construct
SEDRGDFNNL

SEQ ID NO: 153849 - protein, 10 aa, synthetic construct
SEERGDFNNL

SEQ ID NO: 153850 - protein, 10 aa, synthetic construct
SENRGDFNNL

SEQ ID NO: 153851 - protein, 10 aa, synthetic construct
SEQRGDFNNL

SEQ ID NO: 153852 - protein, 10 aa, synthetic construct
SESRGDFNNL

SEQ ID NO: 153853 - protein, 10 aa, synthetic construct
SETRGDFNNL

SEQ ID NO: 153854 - protein, 10 aa, synthetic construct
SEFRGDFNNL

SEQ ID NO: 153855 - protein, 10 aa, synthetic construct
SEGRGDFNNL

SEQ ID NO: 153856 - protein, 10 aa, synthetic construct
SEHRGDFNNL

SEQ ID NO: 153857 - protein, 10 aa, synthetic construct
SEIRGDFNNL

SEQ ID NO: 153858 - protein, 10 aa, synthetic construct
SEKRGDFNNL

SEQ ID NO: 153859 - protein, 10 aa, synthetic construct
SELRGDFNNL

SEQ ID NO: 153860 - protein, 10 aa, synthetic construct
SEMRGDFNNL

SEQ ID NO: 153861 - protein, 10 aa, synthetic construct
SEPRGDFNNL

SEQ ID NO: 153862 - protein, 10 aa, synthetic construct
SERRGDFNNL

SEQ ID NO: 153863 - protein, 10 aa, synthetic construct
SEVRGDFNNL

SEQ ID NO: 153864 - protein, 10 aa, synthetic construct
SEWRGDFNNL

SEQ ID NO: 153865 - protein, 10 aa, synthetic construct
SEYRGDFNNL

SEQ ID NO: 153866 - protein, 10 aa, synthetic construct
SNARGDFNNL

SEQ ID NO: 153867 - protein, 10 aa, synthetic construct
SNDRGDFNNL

SEQ ID NO: 153868 - protein, 10 aa, synthetic construct
SNERGDFNNL

SEQ ID NO: 153869 - protein, 10 aa, synthetic construct
SNNRGDFNNL

SEQ ID NO: 153870 - protein, 10 aa, synthetic construct
SNQRGDFNNL

SEQ ID NO: 153871 - protein, 10 aa, synthetic construct
SNSRGDFNNL

SEQ ID NO: 153872 - protein, 10 aa, synthetic construct
SNTRGDFNNL

SEQ ID NO: 153873 - protein, 10 aa, synthetic construct
SNFRGDFNNL

SEQ ID NO: 153874 - protein, 10 aa, synthetic construct
SNGRGDFNNL

SEQ ID NO: 153875 - protein, 10 aa, synthetic construct
SNHRGDFNNL

SEQ ID NO: 153876 - protein, 10 aa, synthetic construct
SNIRGDFNNL

SEQ ID NO: 153877 - protein, 10 aa, synthetic construct
SNKRGDFNNL

SEQ ID NO: 153878 - protein, 10 aa, synthetic construct
SNLRGDFNNL

SEQ ID NO: 153879 - protein, 10 aa, synthetic construct
SNMRGDFNNL

SEQ ID NO: 153880 - protein, 10 aa, synthetic construct
SNPRGDFNNL

SEQ ID NO: 153881 - protein, 10 aa, synthetic construct
SNRRGDFNNL

SEQ ID NO: 153882 - protein, 10 aa, synthetic construct
SNVRGDFNNL

SEQ ID NO: 153883 - protein, 10 aa, synthetic construct
SNWRGDFNNL

SEQ ID NO: 153884 - protein, 10 aa, synthetic construct
SNYRGDFNNL

SEQ ID NO: 153885 - protein, 10 aa, synthetic construct
SQARGDFNNL

SEQ ID NO: 153886 - protein, 10 aa, synthetic construct
SQDRGDFNNL

SEQ ID NO: 153887 - protein, 10 aa, synthetic construct
SQERGDFNNL

SEQ ID NO: 153888 - protein, 10 aa, synthetic construct
SQNRGDFNNL

SEQ ID NO: 153889 - protein, 10 aa, synthetic construct
SQQRGDFNNL

SEQ ID NO: 153890 - protein, 10 aa, synthetic construct
SQSRGDFNNL

SEQ ID NO: 153891 - protein, 10 aa, synthetic construct
SQTRGDFNNL

SEQ ID NO: 153892 - protein, 10 aa, synthetic construct
SQFRGDFNNL

SEQ ID NO: 153893 - protein, 10 aa, synthetic construct
SQGRGDFNNL

SEQ ID NO: 153894 - protein, 10 aa, synthetic construct
SQHRGDFNNL

SEQ ID NO: 153895 - protein, 10 aa, synthetic construct
SQIRGDFNNL

SEQ ID NO: 153896 - protein, 10 aa, synthetic construct
SQKRGDFNNL

SEQ ID NO: 153897 - protein, 10 aa, synthetic construct
SQLRGDFNNL

SEQ ID NO: 153898 - protein, 10 aa, synthetic construct
SQMRGDFNNL

SEQ ID NO: 153899 - protein, 10 aa, synthetic construct
SQPRGDFNNL

SEQ ID NO: 153900 - protein, 10 aa, synthetic construct
SQRRGDFNNL

SEQ ID NO: 153901 - protein, 10 aa, synthetic construct
SQVRGDFNNL

SEQ ID NO: 153902 - protein, 10 aa, synthetic construct
SQWRGDFNNL

SEQ ID NO: 153903 - protein, 10 aa, synthetic construct
SQYRGDFNNL

SEQ ID NO: 153904 - protein, 10 aa, synthetic construct
SSARGDFNNL

SEQ ID NO: 153905 - protein, 10 aa, synthetic construct
SSDRGDFNNL

SEQ ID NO: 153906 - protein, 10 aa, synthetic construct
SSERGDFNNL

SEQ ID NO: 153907 - protein, 10 aa, synthetic construct
SSNRGDFNNL

SEQ ID NO: 153908 - protein, 10 aa, synthetic construct
SSQRGDFNNL

SEQ ID NO: 153909 - protein, 10 aa, synthetic construct
SSSRGDFNNL

SEQ ID NO: 153910 - protein, 10 aa, synthetic construct
SSTRGDFNNL

SEQ ID NO: 153911 - protein, 10 aa, synthetic construct
SSFRGDFNNL

SEQ ID NO: 153912 - protein, 10 aa, synthetic construct
SSGRGDFNNL

SEQ ID NO: 153913 - protein, 10 aa, synthetic construct
SSHRGDFNNL

SEQ ID NO: 153914 - protein, 10 aa, synthetic construct
SSIRGDFNNL

SEQ ID NO: 153915 - protein, 10 aa, synthetic construct
SSKRGDFNNL

SEQ ID NO: 153916 - protein, 10 aa, synthetic construct
SSLRGDFNNL

SEQ ID NO: 153917 - protein, 10 aa, synthetic construct
SSMRGDFNNL

SEQ ID NO: 153918 - protein, 10 aa, synthetic construct
SSPRGDFNNL

SEQ ID NO: 153919 - protein, 10 aa, synthetic construct
SSRRGDFNNL

SEQ ID NO: 153920 - protein, 10 aa, synthetic construct
SSVRGDFNNL

SEQ ID NO: 153921 - protein, 10 aa, synthetic construct
SSWRGDFNNL

SEQ ID NO: 153922 - protein, 10 aa, synthetic construct
SSYRGDFNNL

SEQ ID NO: 153923 - protein, 10 aa, synthetic construct
STARGDFNNL

SEQ ID NO: 153924 - protein, 10 aa, synthetic construct
STDRGDFNNL

SEQ ID NO: 153925 - protein, 10 aa, synthetic construct
STERGDFNNL

SEQ ID NO: 153926 - protein, 10 aa, synthetic construct
STNRGDFNNL

SEQ ID NO: 153927 - protein, 10 aa, synthetic construct
STQRGDFNNL

SEQ ID NO: 153928 - protein, 10 aa, synthetic construct
STSRGDFNNL

SEQ ID NO: 153929 - protein, 10 aa, synthetic construct
STTRGDFNNL

SEQ ID NO: 153930 - protein, 10 aa, synthetic construct
STFRGDFNNL

SEQ ID NO: 153931 - protein, 10 aa, synthetic construct
STGRGDFNNL

SEQ ID NO: 153932 - protein, 10 aa, synthetic construct
STHRGDFNNL

SEQ ID NO: 153933 - protein, 10 aa, synthetic construct
STIRGDFNNL

SEQ ID NO: 153934 - protein, 10 aa, synthetic construct
STKRGDFNNL

SEQ ID NO: 153935 - protein, 10 aa, synthetic construct
STLRGDFNNL

SEQ ID NO: 153936 - protein, 10 aa, synthetic construct
STMRGDFNNL

SEQ ID NO: 153937 - protein, 10 aa, synthetic construct
STPRGDFNNL

SEQ ID NO: 153938 - protein, 10 aa, synthetic construct
STRRGDFNNL

SEQ ID NO: 153939 - protein, 10 aa, synthetic construct
STVRGDFNNL

SEQ ID NO: 153940 - protein, 10 aa, synthetic construct
STWRGDFNNL

SEQ ID NO: 153941 - protein, 10 aa, synthetic construct
STYRGDFNNL

SEQ ID NO: 153942 - protein, 10 aa, synthetic construct
SFARGDFNNL

SEQ ID NO: 153943 - protein, 10 aa, synthetic construct
SFDRGDFNNL

SEQ ID NO: 153944 - protein, 10 aa, synthetic construct
SFERGDFNNL

SEQ ID NO: 153945 - protein, 10 aa, synthetic construct
SFNRGDFNNL

SEQ ID NO: 153946 - protein, 10 aa, synthetic construct
SFQRGDFNNL

SEQ ID NO: 153947 - protein, 10 aa, synthetic construct
SFSRGDFNNL

SEQ ID NO: 153948 - protein, 10 aa, synthetic construct
SFTRGDFNNL

SEQ ID NO: 153949 - protein, 10 aa, synthetic construct
SFFRGDFNNL

SEQ ID NO: 153950 - protein, 10 aa, synthetic construct
SFGRGDFNNL

SEQ ID NO: 153951 - protein, 10 aa, synthetic construct
SFHRGDFNNL

SEQ ID NO: 153952 - protein, 10 aa, synthetic construct
SFIRGDFNNL

SEQ ID NO: 153953 - protein, 10 aa, synthetic construct
SFKRGDFNNL

SEQ ID NO: 153954 - protein, 10 aa, synthetic construct
SFLRGDFNNL

SEQ ID NO: 153955 - protein, 10 aa, synthetic construct
SFMRGDFNNL

SEQ ID NO: 153956 - protein, 10 aa, synthetic construct
SFPRGDFNNL

SEQ ID NO: 153957 - protein, 10 aa, synthetic construct
SFRRGDFNNL

SEQ ID NO: 153958 - protein, 10 aa, synthetic construct
SFVRGDFNNL

SEQ ID NO: 153959 - protein, 10 aa, synthetic construct
SFWRGDFNNL

SEQ ID NO: 153960 - protein, 10 aa, synthetic construct
SFYRGDFNNL

SEQ ID NO: 153961 - protein, 10 aa, synthetic construct
SGARGDFNNL

SEQ ID NO: 153962 - protein, 10 aa, synthetic construct
SGDRGDFNNL

SEQ ID NO: 153963 - protein, 10 aa, synthetic construct
SGERGDFNNL

SEQ ID NO: 153964 - protein, 10 aa, synthetic construct
SGNRGDFNNL

SEQ ID NO: 153965 - protein, 10 aa, synthetic construct
SGQRGDFNNL

SEQ ID NO: 153966 - protein, 10 aa, synthetic construct
SGSRGDFNNL

SEQ ID NO: 153967 - protein, 10 aa, synthetic construct
SGTRGDFNNL

SEQ ID NO: 153968 - protein, 10 aa, synthetic construct
SGFRGDFNNL

SEQ ID NO: 153969 - protein, 10 aa, synthetic construct
SGGRGDFNNL

SEQ ID NO: 153970 - protein, 10 aa, synthetic construct
SGHRGDFNNL

SEQ ID NO: 153971 - protein, 10 aa, synthetic construct
SGIRGDFNNL

SEQ ID NO: 153972 - protein, 10 aa, synthetic construct
SGKRGDFNNL

SEQ ID NO: 153973 - protein, 10 aa, synthetic construct
SGLRGDFNNL

SEQ ID NO: 153974 - protein, 10 aa, synthetic construct
SGMRGDFNNL

SEQ ID NO: 153975 - protein, 10 aa, synthetic construct
SGPRGDFNNL

SEQ ID NO: 153976 - protein, 10 aa, synthetic construct
SGRRGDFNNL

SEQ ID NO: 153977 - protein, 10 aa, synthetic construct
SGVRGDFNNL

SEQ ID NO: 153978 - protein, 10 aa, synthetic construct
SGWRGDFNNL

SEQ ID NO: 153979 - protein, 10 aa, synthetic construct
SGYRGDFNNL

SEQ ID NO: 153980 - protein, 10 aa, synthetic construct
SHARGDFNNL

SEQ ID NO: 153981 - protein, 10 aa, synthetic construct
SHDRGDFNNL

SEQ ID NO: 153982 - protein, 10 aa, synthetic construct
SHERGDFNNL

SEQ ID NO: 153983 - protein, 10 aa, synthetic construct
SHNRGDFNNL

SEQ ID NO: 153984 - protein, 10 aa, synthetic construct
SHQRGDFNNL

SEQ ID NO: 153985 - protein, 10 aa, synthetic construct
SHSRGDFNNL

SEQ ID NO: 153986 - protein, 10 aa, synthetic construct
SHTRGDFNNL

SEQ ID NO: 153987 - protein, 10 aa, synthetic construct
SHFRGDFNNL

SEQ ID NO: 153988 - protein, 10 aa, synthetic construct
SHGRGDFNNL

SEQ ID NO: 153989 - protein, 10 aa, synthetic construct
SHHRGDFNNL

SEQ ID NO: 153990 - protein, 10 aa, synthetic construct
SHIRGDFNNL

SEQ ID NO: 153991 - protein, 10 aa, synthetic construct
SHKRGDFNNL

SEQ ID NO: 153992 - protein, 10 aa, synthetic construct
SHLRGDFNNL

SEQ ID NO: 153993 - protein, 10 aa, synthetic construct
SHMRGDFNNL

SEQ ID NO: 153994 - protein, 10 aa, synthetic construct
SHPRGDFNNL

SEQ ID NO: 153995 - protein, 10 aa, synthetic construct
SHRRGDFNNL

SEQ ID NO: 153996 - protein, 10 aa, synthetic construct
SHVRGDFNNL

SEQ ID NO: 153997 - protein, 10 aa, synthetic construct
SHWRGDFNNL

SEQ ID NO: 153998 - protein, 10 aa, synthetic construct
SHYRGDFNNL

SEQ ID NO: 153999 - protein, 10 aa, synthetic construct
SIARGDFNNL

SEQ ID NO: 154000 - protein, 10 aa, synthetic construct
SIDRGDFNNL

SEQ ID NO: 154001 - protein, 10 aa, synthetic construct
SIERGDFNNL

SEQ ID NO: 154002 - protein, 10 aa, synthetic construct
SINRGDFNNL

SEQ ID NO: 154003 - protein, 10 aa, synthetic construct
SIQRGDFNNL

SEQ ID NO: 154004 - protein, 10 aa, synthetic construct
SISRGDFNNL

SEQ ID NO: 154005 - protein, 10 aa, synthetic construct
SITRGDFNNL

SEQ ID NO: 154006 - protein, 10 aa, synthetic construct
SIFRGDFNNL

SEQ ID NO: 154007 - protein, 10 aa, synthetic construct
SIGRGDFNNL

SEQ ID NO: 154008 - protein, 10 aa, synthetic construct
SIHRGDFNNL

SEQ ID NO: 154009 - protein, 10 aa, synthetic construct
SIIRGDFNNL

SEQ ID NO: 154010 - protein, 10 aa, synthetic construct
SIKRGDFNNL

SEQ ID NO: 154011 - protein, 10 aa, synthetic construct
SILRGDFNNL

SEQ ID NO: 154012 - protein, 10 aa, synthetic construct
SIMRGDFNNL

SEQ ID NO: 154013 - protein, 10 aa, synthetic construct
SIPRGDFNNL

SEQ ID NO: 154014 - protein, 10 aa, synthetic construct
SIRRGDFNNL

SEQ ID NO: 154015 - protein, 10 aa, synthetic construct
SIVRGDFNNL

SEQ ID NO: 154016 - protein, 10 aa, synthetic construct
SIWRGDFNNL

SEQ ID NO: 154017 - protein, 10 aa, synthetic construct
SIYRGDFNNL

SEQ ID NO: 154018 - protein, 10 aa, synthetic construct
SKARGDFNNL

SEQ ID NO: 154019 - protein, 10 aa, synthetic construct
SKDRGDFNNL

SEQ ID NO: 154020 - protein, 10 aa, synthetic construct
SKERGDFNNL

SEQ ID NO: 154021 - protein, 10 aa, synthetic construct
SKNRGDFNNL

SEQ ID NO: 154022 - protein, 10 aa, synthetic construct
SKQRGDFNNL

SEQ ID NO: 154023 - protein, 10 aa, synthetic construct
SKSRGDFNNL

SEQ ID NO: 154024 - protein, 10 aa, synthetic construct
SKTRGDFNNL

SEQ ID NO: 154025 - protein, 10 aa, synthetic construct
SKFRGDFNNL

SEQ ID NO: 154026 - protein, 10 aa, synthetic construct
SKGRGDFNNL

SEQ ID NO: 154027 - protein, 10 aa, synthetic construct
SKHRGDFNNL

SEQ ID NO: 154028 - protein, 10 aa, synthetic construct
SKIRGDFNNL

SEQ ID NO: 154029 - protein, 10 aa, synthetic construct
SKKRGDFNNL

SEQ ID NO: 154030 - protein, 10 aa, synthetic construct
SKLRGDFNNL

SEQ ID NO: 154031 - protein, 10 aa, synthetic construct
SKMRGDFNNL

SEQ ID NO: 154032 - protein, 10 aa, synthetic construct
SKPRGDFNNL

SEQ ID NO: 154033 - protein, 10 aa, synthetic construct
SKRRGDFNNL

SEQ ID NO: 154034 - protein, 10 aa, synthetic construct
SKVRGDFNNL

SEQ ID NO: 154035 - protein, 10 aa, synthetic construct
SKWRGDFNNL

SEQ ID NO: 154036 - protein, 10 aa, synthetic construct
SKYRGDFNNL

SEQ ID NO: 154037 - protein, 10 aa, synthetic construct
SLARGDFNNL

SEQ ID NO: 154038 - protein, 10 aa, synthetic construct
SLDRGDFNNL

SEQ ID NO: 154039 - protein, 10 aa, synthetic construct
SLERGDFNNL

SEQ ID NO: 154040 - protein, 10 aa, synthetic construct
SLNRGDFNNL

SEQ ID NO: 154041 - protein, 10 aa, synthetic construct
SLQRGDFNNL

SEQ ID NO: 154042 - protein, 10 aa, synthetic construct
SLSRGDFNNL

SEQ ID NO: 154043 - protein, 10 aa, synthetic construct
SLTRGDFNNL

SEQ ID NO: 154044 - protein, 10 aa, synthetic construct
SLFRGDFNNL

SEQ ID NO: 154045 - protein, 10 aa, synthetic construct
SLGRGDFNNL

SEQ ID NO: 154046 - protein, 10 aa, synthetic construct
SLHRGDFNNL

SEQ ID NO: 154047 - protein, 10 aa, synthetic construct
SLIRGDFNNL

SEQ ID NO: 154048 - protein, 10 aa, synthetic construct
SLKRGDFNNL

SEQ ID NO: 154049 - protein, 10 aa, synthetic construct
SLLRGDFNNL

SEQ ID NO: 154050 - protein, 10 aa, synthetic construct
SLMRGDFNNL

SEQ ID NO: 154051 - protein, 10 aa, synthetic construct
SLPRGDFNNL

SEQ ID NO: 154052 - protein, 10 aa, synthetic construct
SLRRGDFNNL

SEQ ID NO: 154053 - protein, 10 aa, synthetic construct
SLVRGDFNNL

SEQ ID NO: 154054 - protein, 10 aa, synthetic construct
SLWRGDFNNL

SEQ ID NO: 154055 - protein, 10 aa, synthetic construct
SLYRGDFNNL

SEQ ID NO: 154056 - protein, 10 aa, synthetic construct
SMARGDFNNL

SEQ ID NO: 154057 - protein, 10 aa, synthetic construct
SMDRGDFNNL

SEQ ID NO: 154058 - protein, 10 aa, synthetic construct
SMERGDFNNL

SEQ ID NO: 154059 - protein, 10 aa, synthetic construct
SMNRGDFNNL

SEQ ID NO: 154060 - protein, 10 aa, synthetic construct
SMQRGDFNNL

SEQ ID NO: 154061 - protein, 10 aa, synthetic construct
SMSRGDFNNL

SEQ ID NO: 154062 - protein, 10 aa, synthetic construct
SMTRGDFNNL

SEQ ID NO: 154063 - protein, 10 aa, synthetic construct
SMFRGDFNNL

SEQ ID NO: 154064 - protein, 10 aa, synthetic construct
SMGRGDFNNL

SEQ ID NO: 154065 - protein, 10 aa, synthetic construct
SMHRGDFNNL

SEQ ID NO: 154066 - protein, 10 aa, synthetic construct
SMIRGDFNNL

SEQ ID NO: 154067 - protein, 10 aa, synthetic construct
SMKRGDFNNL

SEQ ID NO: 154068 - protein, 10 aa, synthetic construct
SMLRGDFNNL

SEQ ID NO: 154069 - protein, 10 aa, synthetic construct
SMMRGDFNNL

SEQ ID NO: 154070 - protein, 10 aa, synthetic construct
SMPRGDFNNL

SEQ ID NO: 154071 - protein, 10 aa, synthetic construct
SMRRGDFNNL

SEQ ID NO: 154072 - protein, 10 aa, synthetic construct
SMVRGDFNNL

SEQ ID NO: 154073 - protein, 10 aa, synthetic construct
SMWRGDFNNL

SEQ ID NO: 154074 - protein, 10 aa, synthetic construct
SMYRGDFNNL

SEQ ID NO: 154075 - protein, 10 aa, synthetic construct
SPARGDFNNL

SEQ ID NO: 154076 - protein, 10 aa, synthetic construct
SPDRGDFNNL

SEQ ID NO: 154077 - protein, 10 aa, synthetic construct
SPERGDFNNL

SEQ ID NO: 154078 - protein, 10 aa, synthetic construct
SPNRGDFNNL

SEQ ID NO: 154079 - protein, 10 aa, synthetic construct
SPQRGDFNNL

SEQ ID NO: 154080 - protein, 10 aa, synthetic construct
SPSRGDFNNL

SEQ ID NO: 154081 - protein, 10 aa, synthetic construct
SPTRGDFNNL

SEQ ID NO: 154082 - protein, 10 aa, synthetic construct
SPFRGDFNNL

SEQ ID NO: 154083 - protein, 10 aa, synthetic construct
SPGRGDFNNL

SEQ ID NO: 154084 - protein, 10 aa, synthetic construct
SPHRGDFNNL

SEQ ID NO: 154085 - protein, 10 aa, synthetic construct
SPIRGDFNNL

SEQ ID NO: 154086 - protein, 10 aa, synthetic construct
SPKRGDFNNL

SEQ ID NO: 154087 - protein, 10 aa, synthetic construct
SPLRGDFNNL

SEQ ID NO: 154088 - protein, 10 aa, synthetic construct
SPMRGDFNNL

SEQ ID NO: 154089 - protein, 10 aa, synthetic construct
SPPRGDFNNL

SEQ ID NO: 154090 - protein, 10 aa, synthetic construct
SPRRGDFNNL

SEQ ID NO: 154091 - protein, 10 aa, synthetic construct
SPVRGDFNNL

SEQ ID NO: 154092 - protein, 10 aa, synthetic construct
SPWRGDFNNL

SEQ ID NO: 154093 - protein, 10 aa, synthetic construct
SPYRGDFNNL

SEQ ID NO: 154094 - protein, 10 aa, synthetic construct
SRARGDFNNL

SEQ ID NO: 154095 - protein, 10 aa, synthetic construct
SRDRGDFNNL

SEQ ID NO: 154096 - protein, 10 aa, synthetic construct
SRERGDFNNL

SEQ ID NO: 154097 - protein, 10 aa, synthetic construct
SRNRGDFNNL

SEQ ID NO: 154098 - protein, 10 aa, synthetic construct
SRQRGDFNNL

SEQ ID NO: 154099 - protein, 10 aa, synthetic construct
SRSRGDFNNL

SEQ ID NO: 154100 - protein, 10 aa, synthetic construct
SRTRGDFNNL

SEQ ID NO: 154101 - protein, 10 aa, synthetic construct
SRFRGDFNNL

SEQ ID NO: 154102 - protein, 10 aa, synthetic construct
SRGRGDFNNL

SEQ ID NO: 154103 - protein, 10 aa, synthetic construct
SRHRGDFNNL

SEQ ID NO: 154104 - protein, 10 aa, synthetic construct
SRIRGDFNNL

SEQ ID NO: 154105 - protein, 10 aa, synthetic construct
SRKRGDFNNL

SEQ ID NO: 154106 - protein, 10 aa, synthetic construct
SRLRGDFNNL

SEQ ID NO: 154107 - protein, 10 aa, synthetic construct
SRMRGDFNNL

SEQ ID NO: 154108 - protein, 10 aa, synthetic construct
SRPRGDFNNL

SEQ ID NO: 154109 - protein, 10 aa, synthetic construct
SRRRGDFNNL

SEQ ID NO: 154110 - protein, 10 aa, synthetic construct
SRVRGDFNNL

SEQ ID NO: 154111 - protein, 10 aa, synthetic construct
SRWRGDFNNL

SEQ ID NO: 154112 - protein, 10 aa, synthetic construct
SRYRGDFNNL

SEQ ID NO: 154113 - protein, 10 aa, synthetic construct
SVARGDFNNL

SEQ ID NO: 154114 - protein, 10 aa, synthetic construct
SVDRGDFNNL

SEQ ID NO: 154115 - protein, 10 aa, synthetic construct
SVERGDFNNL

SEQ ID NO: 154116 - protein, 10 aa, synthetic construct
SVNRGDFNNL

SEQ ID NO: 154117 - protein, 10 aa, synthetic construct
SVQRGDFNNL

SEQ ID NO: 154118 - protein, 10 aa, synthetic construct
SVSRGDFNNL

SEQ ID NO: 154119 - protein, 10 aa, synthetic construct
SVTRGDFNNL

SEQ ID NO: 154120 - protein, 10 aa, synthetic construct
SVFRGDFNNL

SEQ ID NO: 154121 - protein, 10 aa, synthetic construct
SVGRGDFNNL

SEQ ID NO: 154122 - protein, 10 aa, synthetic construct
SVHRGDFNNL

SEQ ID NO: 154123 - protein, 10 aa, synthetic construct
SVIRGDFNNL

SEQ ID NO: 154124 - protein, 10 aa, synthetic construct
SVKRGDFNNL

SEQ ID NO: 154125 - protein, 10 aa, synthetic construct
SVLRGDFNNL

SEQ ID NO: 154126 - protein, 10 aa, synthetic construct
SVMRGDFNNL

SEQ ID NO: 154127 - protein, 10 aa, synthetic construct
SVPRGDFNNL

SEQ ID NO: 154128 - protein, 10 aa, synthetic construct
SVRRGDFNNL

SEQ ID NO: 154129 - protein, 10 aa, synthetic construct
SVVRGDFNNL

SEQ ID NO: 154130 - protein, 10 aa, synthetic construct
SVWRGDFNNL

SEQ ID NO: 154131 - protein, 10 aa, synthetic construct
SVYRGDFNNL

SEQ ID NO: 154132 - protein, 10 aa, synthetic construct
SWARGDFNNL

SEQ ID NO: 154133 - protein, 10 aa, synthetic construct
SWDRGDFNNL

SEQ ID NO: 154134 - protein, 10 aa, synthetic construct
SWERGDFNNL

SEQ ID NO: 154135 - protein, 10 aa, synthetic construct
SWNRGDFNNL

SEQ ID NO: 154136 - protein, 10 aa, synthetic construct
SWQRGDFNNL

SEQ ID NO: 154137 - protein, 10 aa, synthetic construct
SWSRGDFNNL

SEQ ID NO: 154138 - protein, 10 aa, synthetic construct
SWTRGDFNNL

SEQ ID NO: 154139 - protein, 10 aa, synthetic construct
SWFRGDFNNL

SEQ ID NO: 154140 - protein, 10 aa, synthetic construct
SWGRGDFNNL

SEQ ID NO: 154141 - protein, 10 aa, synthetic construct
SWHRGDFNNL

SEQ ID NO: 154142 - protein, 10 aa, synthetic construct
SWIRGDFNNL

SEQ ID NO: 154143 - protein, 10 aa, synthetic construct
SWKRGDFNNL

SEQ ID NO: 154144 - protein, 10 aa, synthetic construct
SWLRGDFNNL

SEQ ID NO: 154145 - protein, 10 aa, synthetic construct
SWMRGDFNNL

SEQ ID NO: 154146 - protein, 10 aa, synthetic construct
SWPRGDFNNL

SEQ ID NO: 154147 - protein, 10 aa, synthetic construct
SWRRGDFNNL

SEQ ID NO: 154148 - protein, 10 aa, synthetic construct
SWVRGDFNNL

SEQ ID NO: 154149 - protein, 10 aa, synthetic construct
SWWRGDFNNL

SEQ ID NO: 154150 - protein, 10 aa, synthetic construct
SWYRGDFNNL

SEQ ID NO: 154151 - protein, 10 aa, synthetic construct
SYARGDFNNL

SEQ ID NO: 154152 - protein, 10 aa, synthetic construct
SYDRGDFNNL

SEQ ID NO: 154153 - protein, 10 aa, synthetic construct
SYERGDFNNL

SEQ ID NO: 154154 - protein, 10 aa, synthetic construct
SYNRGDFNNL

SEQ ID NO: 154155 - protein, 10 aa, synthetic construct
SYQRGDFNNL

SEQ ID NO: 154156 - protein, 10 aa, synthetic construct
SYSRGDFNNL

SEQ ID NO: 154157 - protein, 10 aa, synthetic construct
SYTRGDFNNL

SEQ ID NO: 154158 - protein, 10 aa, synthetic construct
SYFRGDFNNL

SEQ ID NO: 154159 - protein, 10 aa, synthetic construct
SYGRGDFNNL

SEQ ID NO: 154160 - protein, 10 aa, synthetic construct
SYHRGDFNNL

SEQ ID NO: 154161 - protein, 10 aa, synthetic construct
SYIRGDFNNL

SEQ ID NO: 154162 - protein, 10 aa, synthetic construct
SYKRGDFNNL

SEQ ID NO: 154163 - protein, 10 aa, synthetic construct
SYLRGDFNNL

SEQ ID NO: 154164 - protein, 10 aa, synthetic construct
SYMRGDFNNL

SEQ ID NO: 154165 - protein, 10 aa, synthetic construct
SYPRGDFNNL

SEQ ID NO: 154166 - protein, 10 aa, synthetic construct
SYRRGDFNNL

SEQ ID NO: 154167 - protein, 10 aa, synthetic construct
SYVRGDFNNL

SEQ ID NO: 154168 - protein, 10 aa, synthetic construct
SYWRGDFNNL

SEQ ID NO: 154169 - protein, 10 aa, synthetic construct
SYYRGDFNNL

SEQ ID NO: 154170 - protein, 10 aa, synthetic construct
TAARGDFNNL

SEQ ID NO: 154171 - protein, 10 aa, synthetic construct
TADRGDFNNL

SEQ ID NO: 154172 - protein, 10 aa, synthetic construct
TAERGDFNNL

SEQ ID NO: 154173 - protein, 10 aa, synthetic construct
TANRGDFNNL

SEQ ID NO: 154174 - protein, 10 aa, synthetic construct
TAQRGDFNNL

SEQ ID NO: 154175 - protein, 10 aa, synthetic construct
TASRGDFNNL

SEQ ID NO: 154176 - protein, 10 aa, synthetic construct
TATRGDFNNL

SEQ ID NO: 154177 - protein, 10 aa, synthetic construct
TAFRGDFNNL

SEQ ID NO: 154178 - protein, 10 aa, synthetic construct
TAGRGDFNNL

SEQ ID NO: 154179 - protein, 10 aa, synthetic construct
TAHRGDFNNL

SEQ ID NO: 154180 - protein, 10 aa, synthetic construct
TAIRGDFNNL

SEQ ID NO: 154181 - protein, 10 aa, synthetic construct
TAKRGDFNNL

SEQ ID NO: 154182 - protein, 10 aa, synthetic construct
TALRGDFNNL

SEQ ID NO: 154183 - protein, 10 aa, synthetic construct
TAMRGDFNNL

SEQ ID NO: 154184 - protein, 10 aa, synthetic construct
TAPRGDFNNL

SEQ ID NO: 154185 - protein, 10 aa, synthetic construct
TARRGDFNNL

SEQ ID NO: 154186 - protein, 10 aa, synthetic construct
TAVRGDFNNL

SEQ ID NO: 154187 - protein, 10 aa, synthetic construct
TAWRGDFNNL

SEQ ID NO: 154188 - protein, 10 aa, synthetic construct
TAYRGDFNNL

SEQ ID NO: 154189 - protein, 10 aa, synthetic construct
TDARGDFNNL

SEQ ID NO: 154190 - protein, 10 aa, synthetic construct
TDDRGDFNNL

SEQ ID NO: 154191 - protein, 10 aa, synthetic construct
TDERGDFNNL

SEQ ID NO: 154192 - protein, 10 aa, synthetic construct
TDNRGDFNNL

SEQ ID NO: 154193 - protein, 10 aa, synthetic construct
TDQRGDFNNL

SEQ ID NO: 154194 - protein, 10 aa, synthetic construct
TDSRGDFNNL

SEQ ID NO: 154195 - protein, 10 aa, synthetic construct
TDTRGDFNNL

SEQ ID NO: 154196 - protein, 10 aa, synthetic construct
TDFRGDFNNL

SEQ ID NO: 154197 - protein, 10 aa, synthetic construct
TDGRGDFNNL

SEQ ID NO: 154198 - protein, 10 aa, synthetic construct
TDHRGDFNNL

SEQ ID NO: 154199 - protein, 10 aa, synthetic construct
TDIRGDFNNL

SEQ ID NO: 154200 - protein, 10 aa, synthetic construct
TDKRGDFNNL

SEQ ID NO: 154201 - protein, 10 aa, synthetic construct
TDLRGDFNNL

SEQ ID NO: 154202 - protein, 10 aa, synthetic construct
TDMRGDFNNL

SEQ ID NO: 154203 - protein, 10 aa, synthetic construct
TDPRGDFNNL

SEQ ID NO: 154204 - protein, 10 aa, synthetic construct
TDRRGDFNNL

SEQ ID NO: 154205 - protein, 10 aa, synthetic construct
TDVRGDFNNL

SEQ ID NO: 154206 - protein, 10 aa, synthetic construct
TDWRGDFNNL

SEQ ID NO: 154207 - protein, 10 aa, synthetic construct
TDYRGDFNNL

SEQ ID NO: 154208 - protein, 10 aa, synthetic construct
TEARGDFNNL

SEQ ID NO: 154209 - protein, 10 aa, synthetic construct
TEDRGDFNNL

SEQ ID NO: 154210 - protein, 10 aa, synthetic construct
TEERGDFNNL

SEQ ID NO: 154211 - protein, 10 aa, synthetic construct
TENRGDFNNL

SEQ ID NO: 154212 - protein, 10 aa, synthetic construct
TEQRGDFNNL

SEQ ID NO: 154213 - protein, 10 aa, synthetic construct
TESRGDFNNL

SEQ ID NO: 154214 - protein, 10 aa, synthetic construct
TETRGDFNNL

SEQ ID NO: 154215 - protein, 10 aa, synthetic construct
TEFRGDFNNL

SEQ ID NO: 154216 - protein, 10 aa, synthetic construct
TEGRGDFNNL

SEQ ID NO: 154217 - protein, 10 aa, synthetic construct
TEHRGDFNNL

SEQ ID NO: 154218 - protein, 10 aa, synthetic construct
TEIRGDFNNL

SEQ ID NO: 154219 - protein, 10 aa, synthetic construct
TEKRGDFNNL

SEQ ID NO: 154220 - protein, 10 aa, synthetic construct
TELRGDFNNL

SEQ ID NO: 154221 - protein, 10 aa, synthetic construct
TEMRGDFNNL

SEQ ID NO: 154222 - protein, 10 aa, synthetic construct
TEPRGDFNNL

SEQ ID NO: 154223 - protein, 10 aa, synthetic construct
TERRGDFNNL

SEQ ID NO: 154224 - protein, 10 aa, synthetic construct
TEVRGDFNNL

SEQ ID NO: 154225 - protein, 10 aa, synthetic construct
TEWRGDFNNL

SEQ ID NO: 154226 - protein, 10 aa, synthetic construct
TEYRGDFNNL

SEQ ID NO: 154227 - protein, 10 aa, synthetic construct
TNARGDFNNL

SEQ ID NO: 154228 - protein, 10 aa, synthetic construct
TNDRGDFNNL

SEQ ID NO: 154229 - protein, 10 aa, synthetic construct
TNERGDFNNL

SEQ ID NO: 154230 - protein, 10 aa, synthetic construct
TNNRGDFNNL

SEQ ID NO: 154231 - protein, 10 aa, synthetic construct
TNQRGDFNNL

SEQ ID NO: 154232 - protein, 10 aa, synthetic construct
TNSRGDFNNL

SEQ ID NO: 154233 - protein, 10 aa, synthetic construct
TNTRGDFNNL

SEQ ID NO: 154234 - protein, 10 aa, synthetic construct
TNFRGDFNNL

SEQ ID NO: 154235 - protein, 10 aa, synthetic construct
TNGRGDFNNL

SEQ ID NO: 154236 - protein, 10 aa, synthetic construct
TNHRGDFNNL

SEQ ID NO: 154237 - protein, 10 aa, synthetic construct
TNIRGDFNNL

SEQ ID NO: 154238 - protein, 10 aa, synthetic construct
TNKRGDFNNL

SEQ ID NO: 154239 - protein, 10 aa, synthetic construct
TNLRGDFNNL

SEQ ID NO: 154240 - protein, 10 aa, synthetic construct
TNMRGDFNNL

SEQ ID NO: 154241 - protein, 10 aa, synthetic construct
TNPRGDFNNL

SEQ ID NO: 154242 - protein, 10 aa, synthetic construct
TNRRGDFNNL

SEQ ID NO: 154243 - protein, 10 aa, synthetic construct
TNVRGDFNNL

SEQ ID NO: 154244 - protein, 10 aa, synthetic construct
TNWRGDFNNL

SEQ ID NO: 154245 - protein, 10 aa, synthetic construct
TNYRGDFNNL

SEQ ID NO: 154246 - protein, 10 aa, synthetic construct
TQARGDFNNL

SEQ ID NO: 154247 - protein, 10 aa, synthetic construct
TQDRGDFNNL

SEQ ID NO: 154248 - protein, 10 aa, synthetic construct
TQERGDFNNL

SEQ ID NO: 154249 - protein, 10 aa, synthetic construct
TQNRGDFNNL

SEQ ID NO: 154250 - protein, 10 aa, synthetic construct
TQQRGDFNNL

SEQ ID NO: 154251 - protein, 10 aa, synthetic construct
TQSRGDFNNL

SEQ ID NO: 154252 - protein, 10 aa, synthetic construct
TQTRGDFNNL

SEQ ID NO: 154253 - protein, 10 aa, synthetic construct
TQFRGDFNNL

SEQ ID NO: 154254 - protein, 10 aa, synthetic construct
TQGRGDFNNL

SEQ ID NO: 154255 - protein, 10 aa, synthetic construct
TQHRGDFNNL

SEQ ID NO: 154256 - protein, 10 aa, synthetic construct
TQIRGDFNNL

SEQ ID NO: 154257 - protein, 10 aa, synthetic construct
TQKRGDFNNL

SEQ ID NO: 154258 - protein, 10 aa, synthetic construct
TQLRGDFNNL

SEQ ID NO: 154259 - protein, 10 aa, synthetic construct
TQMRGDFNNL

SEQ ID NO: 154260 - protein, 10 aa, synthetic construct
TQPRGDFNNL

SEQ ID NO: 154261 - protein, 10 aa, synthetic construct
TQRRGDFNNL

SEQ ID NO: 154262 - protein, 10 aa, synthetic construct
TQVRGDFNNL

SEQ ID NO: 154263 - protein, 10 aa, synthetic construct
TQWRGDFNNL

SEQ ID NO: 154264 - protein, 10 aa, synthetic construct
TQYRGDFNNL

SEQ ID NO: 154265 - protein, 10 aa, synthetic construct
TSARGDFNNL

SEQ ID NO: 154266 - protein, 10 aa, synthetic construct
TSDRGDFNNL

SEQ ID NO: 154267 - protein, 10 aa, synthetic construct
TSERGDFNNL

SEQ ID NO: 154268 - protein, 10 aa, synthetic construct
TSNRGDFNNL

SEQ ID NO: 154269 - protein, 10 aa, synthetic construct
TSQRGDFNNL

SEQ ID NO: 154270 - protein, 10 aa, synthetic construct
TSSRGDFNNL

SEQ ID NO: 154271 - protein, 10 aa, synthetic construct
TSTRGDFNNL

SEQ ID NO: 154272 - protein, 10 aa, synthetic construct
TSFRGDFNNL

SEQ ID NO: 154273 - protein, 10 aa, synthetic construct
TSGRGDFNNL

SEQ ID NO: 154274 - protein, 10 aa, synthetic construct
TSHRGDFNNL

SEQ ID NO: 154275 - protein, 10 aa, synthetic construct
TSIRGDFNNL

SEQ ID NO: 154276 - protein, 10 aa, synthetic construct
TSKRGDFNNL

SEQ ID NO: 154277 - protein, 10 aa, synthetic construct
TSLRGDFNNL

SEQ ID NO: 154278 - protein, 10 aa, synthetic construct
TSMRGDFNNL

SEQ ID NO: 154279 - protein, 10 aa, synthetic construct
TSPRGDFNNL

SEQ ID NO: 154280 - protein, 10 aa, synthetic construct
TSRRGDFNNL

SEQ ID NO: 154281 - protein, 10 aa, synthetic construct
TSVRGDFNNL

SEQ ID NO: 154282 - protein, 10 aa, synthetic construct
TSWRGDFNNL

SEQ ID NO: 154283 - protein, 10 aa, synthetic construct
TSYRGDFNNL

SEQ ID NO: 154284 - protein, 10 aa, synthetic construct
TTARGDFNNL

SEQ ID NO: 154285 - protein, 10 aa, synthetic construct
TTDRGDFNNL

SEQ ID NO: 154286 - protein, 10 aa, synthetic construct
TTERGDFNNL

SEQ ID NO: 154287 - protein, 10 aa, synthetic construct
TTNRGDFNNL

SEQ ID NO: 154288 - protein, 10 aa, synthetic construct
TTQRGDFNNL

SEQ ID NO: 154289 - protein, 10 aa, synthetic construct
TTSRGDFNNL

SEQ ID NO: 154290 - protein, 10 aa, synthetic construct
TTTRGDFNNL

SEQ ID NO: 154291 - protein, 10 aa, synthetic construct
TTFRGDFNNL

SEQ ID NO: 154292 - protein, 10 aa, synthetic construct
TTGRGDFNNL

SEQ ID NO: 154293 - protein, 10 aa, synthetic construct
TTHRGDFNNL

SEQ ID NO: 154294 - protein, 10 aa, synthetic construct
TTIRGDFNNL

SEQ ID NO: 154295 - protein, 10 aa, synthetic construct
TTKRGDFNNL

SEQ ID NO: 154296 - protein, 10 aa, synthetic construct
TTLRGDFNNL

SEQ ID NO: 154297 - protein, 10 aa, synthetic construct
TTMRGDFNNL

SEQ ID NO: 154298 - protein, 10 aa, synthetic construct
TTPRGDFNNL

SEQ ID NO: 154299 - protein, 10 aa, synthetic construct
TTRRGDFNNL

SEQ ID NO: 154300 - protein, 10 aa, synthetic construct
TTVRGDFNNL

SEQ ID NO: 154301 - protein, 10 aa, synthetic construct
TTWRGDFNNL

SEQ ID NO: 154302 - protein, 10 aa, synthetic construct
TTYRGDFNNL

SEQ ID NO: 154303 - protein, 10 aa, synthetic construct
TFARGDFNNL

SEQ ID NO: 154304 - protein, 10 aa, synthetic construct
TFDRGDFNNL

SEQ ID NO: 154305 - protein, 10 aa, synthetic construct
TFERGDFNNL

SEQ ID NO: 154306 - protein, 10 aa, synthetic construct
TFNRGDFNNL

SEQ ID NO: 154307 - protein, 10 aa, synthetic construct
TFQRGDFNNL

SEQ ID NO: 154308 - protein, 10 aa, synthetic construct
TFSRGDFNNL

SEQ ID NO: 154309 - protein, 10 aa, synthetic construct
TFTRGDFNNL

SEQ ID NO: 154310 - protein, 10 aa, synthetic construct
TFFRGDFNNL

SEQ ID NO: 154311 - protein, 10 aa, synthetic construct
TFGRGDFNNL

SEQ ID NO: 154312 - protein, 10 aa, synthetic construct
TFHRGDFNNL

SEQ ID NO: 154313 - protein, 10 aa, synthetic construct
TFIRGDFNNL

SEQ ID NO: 154314 - protein, 10 aa, synthetic construct
TFKRGDFNNL

SEQ ID NO: 154315 - protein, 10 aa, synthetic construct
TFLRGDFNNL

SEQ ID NO: 154316 - protein, 10 aa, synthetic construct
TFMRGDFNNL

SEQ ID NO: 154317 - protein, 10 aa, synthetic construct
TFPRGDFNNL

SEQ ID NO: 154318 - protein, 10 aa, synthetic construct
TFRRGDFNNL

SEQ ID NO: 154319 - protein, 10 aa, synthetic construct
TFVRGDFNNL

SEQ ID NO: 154320 - protein, 10 aa, synthetic construct
TFWRGDFNNL

SEQ ID NO: 154321 - protein, 10 aa, synthetic construct
TFYRGDFNNL

SEQ ID NO: 154322 - protein, 10 aa, synthetic construct
TGARGDFNNL

SEQ ID NO: 154323 - protein, 10 aa, synthetic construct
TGDRGDFNNL

SEQ ID NO: 154324 - protein, 10 aa, synthetic construct
TGERGDFNNL

SEQ ID NO: 154325 - protein, 10 aa, synthetic construct
TGNRGDFNNL

SEQ ID NO: 154326 - protein, 10 aa, synthetic construct
TGQRGDFNNL

SEQ ID NO: 154327 - protein, 10 aa, synthetic construct
TGSRGDFNNL

SEQ ID NO: 154328 - protein, 10 aa, synthetic construct
TGTRGDFNNL

SEQ ID NO: 154329 - protein, 10 aa, synthetic construct
TGFRGDFNNL

SEQ ID NO: 154330 - protein, 10 aa, synthetic construct
TGGRGDFNNL

SEQ ID NO: 154331 - protein, 10 aa, synthetic construct
TGHRGDFNNL

SEQ ID NO: 154332 - protein, 10 aa, synthetic construct
TGIRGDFNNL

SEQ ID NO: 154333 - protein, 10 aa, synthetic construct
TGKRGDFNNL

SEQ ID NO: 154334 - protein, 10 aa, synthetic construct
TGLRGDFNNL

SEQ ID NO: 154335 - protein, 10 aa, synthetic construct
TGMRGDFNNL

SEQ ID NO: 154336 - protein, 10 aa, synthetic construct
TGPRGDFNNL

SEQ ID NO: 154337 - protein, 10 aa, synthetic construct
TGRRGDFNNL

SEQ ID NO: 154338 - protein, 10 aa, synthetic construct
TGVRGDFNNL

SEQ ID NO: 154339 - protein, 10 aa, synthetic construct
TGWRGDFNNL

SEQ ID NO: 154340 - protein, 10 aa, synthetic construct
TGYRGDFNNL

SEQ ID NO: 154341 - protein, 10 aa, synthetic construct
THARGDFNNL

SEQ ID NO: 154342 - protein, 10 aa, synthetic construct
THDRGDFNNL

SEQ ID NO: 154343 - protein, 10 aa, synthetic construct
THERGDFNNL

SEQ ID NO: 154344 - protein, 10 aa, synthetic construct
THNRGDFNNL

SEQ ID NO: 154345 - protein, 10 aa, synthetic construct
THQRGDFNNL

SEQ ID NO: 154346 - protein, 10 aa, synthetic construct
THSRGDFNNL

SEQ ID NO: 154347 - protein, 10 aa, synthetic construct
THTRGDFNNL

SEQ ID NO: 154348 - protein, 10 aa, synthetic construct
THFRGDFNNL

SEQ ID NO: 154349 - protein, 10 aa, synthetic construct
THGRGDFNNL

SEQ ID NO: 154350 - protein, 10 aa, synthetic construct
THHRGDFNNL

SEQ ID NO: 154351 - protein, 10 aa, synthetic construct
THIRGDFNNL

SEQ ID NO: 154352 - protein, 10 aa, synthetic construct
THKRGDFNNL

SEQ ID NO: 154353 - protein, 10 aa, synthetic construct
THLRGDFNNL

SEQ ID NO: 154354 - protein, 10 aa, synthetic construct
THMRGDFNNL

SEQ ID NO: 154355 - protein, 10 aa, synthetic construct
THPRGDFNNL

SEQ ID NO: 154356 - protein, 10 aa, synthetic construct
THRRGDFNNL

SEQ ID NO: 154357 - protein, 10 aa, synthetic construct
THVRGDFNNL

SEQ ID NO: 154358 - protein, 10 aa, synthetic construct
THWRGDFNNL

SEQ ID NO: 154359 - protein, 10 aa, synthetic construct
THYRGDFNNL

SEQ ID NO: 154360 - protein, 10 aa, synthetic construct
TIARGDFNNL

SEQ ID NO: 154361 - protein, 10 aa, synthetic construct
TIDRGDFNNL

SEQ ID NO: 154362 - protein, 10 aa, synthetic construct
TIERGDFNNL

SEQ ID NO: 154363 - protein, 10 aa, synthetic construct
TINRGDFNNL

SEQ ID NO: 154364 - protein, 10 aa, synthetic construct
TIQRGDFNNL

SEQ ID NO: 154365 - protein, 10 aa, synthetic construct
TISRGDFNNL

SEQ ID NO: 154366 - protein, 10 aa, synthetic construct
TITRGDFNNL

SEQ ID NO: 154367 - protein, 10 aa, synthetic construct
TIFRGDFNNL

SEQ ID NO: 154368 - protein, 10 aa, synthetic construct
TIGRGDFNNL

SEQ ID NO: 154369 - protein, 10 aa, synthetic construct
TIHRGDFNNL

SEQ ID NO: 154370 - protein, 10 aa, synthetic construct
TIIRGDFNNL

SEQ ID NO: 154371 - protein, 10 aa, synthetic construct
TIKRGDFNNL

SEQ ID NO: 154372 - protein, 10 aa, synthetic construct
TILRGDFNNL

SEQ ID NO: 154373 - protein, 10 aa, synthetic construct
TIMRGDFNNL

SEQ ID NO: 154374 - protein, 10 aa, synthetic construct
TIPRGDFNNL

SEQ ID NO: 154375 - protein, 10 aa, synthetic construct
TIRRGDFNNL

SEQ ID NO: 154376 - protein, 10 aa, synthetic construct
TIVRGDFNNL

SEQ ID NO: 154377 - protein, 10 aa, synthetic construct
TIWRGDFNNL

SEQ ID NO: 154378 - protein, 10 aa, synthetic construct
TIYRGDFNNL

SEQ ID NO: 154379 - protein, 10 aa, synthetic construct
TKARGDFNNL

SEQ ID NO: 154380 - protein, 10 aa, synthetic construct
TKDRGDFNNL

SEQ ID NO: 154381 - protein, 10 aa, synthetic construct
TKERGDFNNL

SEQ ID NO: 154382 - protein, 10 aa, synthetic construct
TKNRGDFNNL

SEQ ID NO: 154383 - protein, 10 aa, synthetic construct
TKQRGDFNNL

SEQ ID NO: 154384 - protein, 10 aa, synthetic construct
TKSRGDFNNL

SEQ ID NO: 154385 - protein, 10 aa, synthetic construct
TKTRGDFNNL

SEQ ID NO: 154386 - protein, 10 aa, synthetic construct
TKFRGDFNNL

SEQ ID NO: 154387 - protein, 10 aa, synthetic construct
TKGRGDFNNL

SEQ ID NO: 154388 - protein, 10 aa, synthetic construct
TKHRGDFNNL

SEQ ID NO: 154389 - protein, 10 aa, synthetic construct
TKIRGDFNNL

SEQ ID NO: 154390 - protein, 10 aa, synthetic construct
TKKRGDFNNL

SEQ ID NO: 154391 - protein, 10 aa, synthetic construct
TKLRGDFNNL

SEQ ID NO: 154392 - protein, 10 aa, synthetic construct
TKMRGDFNNL

SEQ ID NO: 154393 - protein, 10 aa, synthetic construct
TKPRGDFNNL

SEQ ID NO: 154394 - protein, 10 aa, synthetic construct
TKRRGDFNNL

SEQ ID NO: 154395 - protein, 10 aa, synthetic construct
TKVRGDFNNL

SEQ ID NO: 154396 - protein, 10 aa, synthetic construct
TKWRGDFNNL

SEQ ID NO: 154397 - protein, 10 aa, synthetic construct
TKYRGDFNNL

SEQ ID NO: 154398 - protein, 10 aa, synthetic construct
TLARGDFNNL

SEQ ID NO: 154399 - protein, 10 aa, synthetic construct
TLDRGDFNNL

SEQ ID NO: 154400 - protein, 10 aa, synthetic construct
TLERGDFNNL

SEQ ID NO: 154401 - protein, 10 aa, synthetic construct
TLNRGDFNNL

SEQ ID NO: 154402 - protein, 10 aa, synthetic construct
TLQRGDFNNL

SEQ ID NO: 154403 - protein, 10 aa, synthetic construct
TLSRGDFNNL

SEQ ID NO: 154404 - protein, 10 aa, synthetic construct
TLTRGDFNNL

SEQ ID NO: 154405 - protein, 10 aa, synthetic construct
TLFRGDFNNL

SEQ ID NO: 154406 - protein, 10 aa, synthetic construct
TLGRGDFNNL

SEQ ID NO: 154407 - protein, 10 aa, synthetic construct
TLHRGDFNNL

SEQ ID NO: 154408 - protein, 10 aa, synthetic construct
TLIRGDFNNL

SEQ ID NO: 154409 - protein, 10 aa, synthetic construct
TLKRGDFNNL

SEQ ID NO: 154410 - protein, 10 aa, synthetic construct
TLLRGDFNNL

SEQ ID NO: 154411 - protein, 10 aa, synthetic construct
TLMRGDFNNL

SEQ ID NO: 154412 - protein, 10 aa, synthetic construct
TLPRGDFNNL

SEQ ID NO: 154413 - protein, 10 aa, synthetic construct
TLRRGDFNNL

SEQ ID NO: 154414 - protein, 10 aa, synthetic construct
TLVRGDFNNL

SEQ ID NO: 154415 - protein, 10 aa, synthetic construct
TLWRGDFNNL

SEQ ID NO: 154416 - protein, 10 aa, synthetic construct
TLYRGDFNNL

SEQ ID NO: 154417 - protein, 10 aa, synthetic construct
TMARGDFNNL

SEQ ID NO: 154418 - protein, 10 aa, synthetic construct
TMDRGDFNNL

SEQ ID NO: 154419 - protein, 10 aa, synthetic construct
TMERGDFNNL

SEQ ID NO: 154420 - protein, 10 aa, synthetic construct
TMNRGDFNNL

SEQ ID NO: 154421 - protein, 10 aa, synthetic construct
TMQRGDFNNL

SEQ ID NO: 154422 - protein, 10 aa, synthetic construct
TMSRGDFNNL

SEQ ID NO: 154423 - protein, 10 aa, synthetic construct
TMTRGDFNNL

SEQ ID NO: 154424 - protein, 10 aa, synthetic construct
TMFRGDFNNL

SEQ ID NO: 154425 - protein, 10 aa, synthetic construct
TMGRGDFNNL

SEQ ID NO: 154426 - protein, 10 aa, synthetic construct
TMHRGDFNNL

SEQ ID NO: 154427 - protein, 10 aa, synthetic construct
TMIRGDFNNL

SEQ ID NO: 154428 - protein, 10 aa, synthetic construct
TMKRGDFNNL

SEQ ID NO: 154429 - protein, 10 aa, synthetic construct
TMLRGDFNNL

SEQ ID NO: 154430 - protein, 10 aa, synthetic construct
TMMRGDFNNL

SEQ ID NO: 154431 - protein, 10 aa, synthetic construct
TMPRGDFNNL

SEQ ID NO: 154432 - protein, 10 aa, synthetic construct
TMRRGDFNNL

SEQ ID NO: 154433 - protein, 10 aa, synthetic construct
TMVRGDFNNL

SEQ ID NO: 154434 - protein, 10 aa, synthetic construct
TMWRGDFNNL

SEQ ID NO: 154435 - protein, 10 aa, synthetic construct
TMYRGDFNNL

SEQ ID NO: 154436 - protein, 10 aa, synthetic construct
TPARGDFNNL

SEQ ID NO: 154437 - protein, 10 aa, synthetic construct
TPDRGDFNNL

SEQ ID NO: 154438 - protein, 10 aa, synthetic construct
TPERGDFNNL

SEQ ID NO: 154439 - protein, 10 aa, synthetic construct
TPNRGDFNNL

SEQ ID NO: 154440 - protein, 10 aa, synthetic construct
TPQRGDFNNL

SEQ ID NO: 154441 - protein, 10 aa, synthetic construct
TPSRGDFNNL

SEQ ID NO: 154442 - protein, 10 aa, synthetic construct
TPTRGDFNNL

SEQ ID NO: 154443 - protein, 10 aa, synthetic construct
TPFRGDFNNL

SEQ ID NO: 154444 - protein, 10 aa, synthetic construct
TPGRGDFNNL

SEQ ID NO: 154445 - protein, 10 aa, synthetic construct
TPHRGDFNNL

SEQ ID NO: 154446 - protein, 10 aa, synthetic construct
TPIRGDFNNL

SEQ ID NO: 154447 - protein, 10 aa, synthetic construct
TPKRGDFNNL

SEQ ID NO: 154448 - protein, 10 aa, synthetic construct
TPLRGDFNNL

SEQ ID NO: 154449 - protein, 10 aa, synthetic construct
TPMRGDFNNL

SEQ ID NO: 154450 - protein, 10 aa, synthetic construct
TPPRGDFNNL

SEQ ID NO: 154451 - protein, 10 aa, synthetic construct
TPRRGDFNNL

SEQ ID NO: 154452 - protein, 10 aa, synthetic construct
TPVRGDFNNL

SEQ ID NO: 154453 - protein, 10 aa, synthetic construct
TPWRGDFNNL

SEQ ID NO: 154454 - protein, 10 aa, synthetic construct
TPYRGDFNNL

SEQ ID NO: 154455 - protein, 10 aa, synthetic construct
TRARGDFNNL

SEQ ID NO: 154456 - protein, 10 aa, synthetic construct
TRDRGDFNNL

SEQ ID NO: 154457 - protein, 10 aa, synthetic construct
TRERGDFNNL

SEQ ID NO: 154458 - protein, 10 aa, synthetic construct
TRNRGDFNNL

SEQ ID NO: 154459 - protein, 10 aa, synthetic construct
TRQRGDFNNL

SEQ ID NO: 154460 - protein, 10 aa, synthetic construct
TRSRGDFNNL

SEQ ID NO: 154461 - protein, 10 aa, synthetic construct
TRTRGDFNNL

SEQ ID NO: 154462 - protein, 10 aa, synthetic construct
TRFRGDFNNL

SEQ ID NO: 154463 - protein, 10 aa, synthetic construct
TRGRGDFNNL

SEQ ID NO: 154464 - protein, 10 aa, synthetic construct
TRHRGDFNNL

SEQ ID NO: 154465 - protein, 10 aa, synthetic construct
TRIRGDFNNL

SEQ ID NO: 154466 - protein, 10 aa, synthetic construct
TRKRGDFNNL

SEQ ID NO: 154467 - protein, 10 aa, synthetic construct
TRLRGDFNNL

SEQ ID NO: 154468 - protein, 10 aa, synthetic construct
TRMRGDFNNL

SEQ ID NO: 154469 - protein, 10 aa, synthetic construct
TRPRGDFNNL

SEQ ID NO: 154470 - protein, 10 aa, synthetic construct
TRRRGDFNNL

SEQ ID NO: 154471 - protein, 10 aa, synthetic construct
TRVRGDFNNL

SEQ ID NO: 154472 - protein, 10 aa, synthetic construct
TRWRGDFNNL

SEQ ID NO: 154473 - protein, 10 aa, synthetic construct
TRYRGDFNNL

SEQ ID NO: 154474 - protein, 10 aa, synthetic construct
TVARGDFNNL

SEQ ID NO: 154475 - protein, 10 aa, synthetic construct
TVDRGDFNNL

SEQ ID NO: 154476 - protein, 10 aa, synthetic construct
TVERGDFNNL

SEQ ID NO: 154477 - protein, 10 aa, synthetic construct
TVNRGDFNNL

SEQ ID NO: 154478 - protein, 10 aa, synthetic construct
TVQRGDFNNL

SEQ ID NO: 154479 - protein, 10 aa, synthetic construct
TVSRGDFNNL

SEQ ID NO: 154480 - protein, 10 aa, synthetic construct
TVTRGDFNNL

SEQ ID NO: 154481 - protein, 10 aa, synthetic construct
TVFRGDFNNL

SEQ ID NO: 154482 - protein, 10 aa, synthetic construct
TVGRGDFNNL

SEQ ID NO: 154483 - protein, 10 aa, synthetic construct
TVHRGDFNNL

SEQ ID NO: 154484 - protein, 10 aa, synthetic construct
TVIRGDFNNL

SEQ ID NO: 154485 - protein, 10 aa, synthetic construct
TVKRGDFNNL

SEQ ID NO: 154486 - protein, 10 aa, synthetic construct
TVLRGDFNNL

SEQ ID NO: 154487 - protein, 10 aa, synthetic construct
TVMRGDFNNL

SEQ ID NO: 154488 - protein, 10 aa, synthetic construct
TVPRGDFNNL

SEQ ID NO: 154489 - protein, 10 aa, synthetic construct
TVRRGDFNNL

SEQ ID NO: 154490 - protein, 10 aa, synthetic construct
TVVRGDFNNL

SEQ ID NO: 154491 - protein, 10 aa, synthetic construct
TVWRGDFNNL

SEQ ID NO: 154492 - protein, 10 aa, synthetic construct
TVYRGDFNNL

SEQ ID NO: 154493 - protein, 10 aa, synthetic construct
TWARGDFNNL

SEQ ID NO: 154494 - protein, 10 aa, synthetic construct
TWDRGDFNNL

SEQ ID NO: 154495 - protein, 10 aa, synthetic construct
TWERGDFNNL

SEQ ID NO: 154496 - protein, 10 aa, synthetic construct
TWNRGDFNNL

SEQ ID NO: 154497 - protein, 10 aa, synthetic construct
TWQRGDFNNL

SEQ ID NO: 154498 - protein, 10 aa, synthetic construct
TWSRGDFNNL

SEQ ID NO: 154499 - protein, 10 aa, synthetic construct
TWTRGDFNNL

SEQ ID NO: 154500 - protein, 10 aa, synthetic construct
TWFRGDFNNL

SEQ ID NO: 154501 - protein, 10 aa, synthetic construct
TWGRGDFNNL

SEQ ID NO: 154502 - protein, 10 aa, synthetic construct
TWHRGDFNNL

SEQ ID NO: 154503 - protein, 10 aa, synthetic construct
TWIRGDFNNL

SEQ ID NO: 154504 - protein, 10 aa, synthetic construct
TWKRGDFNNL

SEQ ID NO: 154505 - protein, 10 aa, synthetic construct
TWLRGDFNNL

SEQ ID NO: 154506 - protein, 10 aa, synthetic construct
TWMRGDFNNL

SEQ ID NO: 154507 - protein, 10 aa, synthetic construct
TWPRGDFNNL

SEQ ID NO: 154508 - protein, 10 aa, synthetic construct
TWRRGDFNNL

SEQ ID NO: 154509 - protein, 10 aa, synthetic construct
TWVRGDFNNL

SEQ ID NO: 154510 - protein, 10 aa, synthetic construct
TWWRGDFNNL

SEQ ID NO: 154511 - protein, 10 aa, synthetic construct
TWYRGDFNNL

SEQ ID NO: 154512 - protein, 10 aa, synthetic construct
TYARGDFNNL

SEQ ID NO: 154513 - protein, 10 aa, synthetic construct
TYDRGDFNNL

SEQ ID NO: 154514 - protein, 10 aa, synthetic construct
TYERGDFNNL

SEQ ID NO: 154515 - protein, 10 aa, synthetic construct
TYNRGDFNNL

SEQ ID NO: 154516 - protein, 10 aa, synthetic construct
TYQRGDFNNL

SEQ ID NO: 154517 - protein, 10 aa, synthetic construct
TYSRGDFNNL

SEQ ID NO: 154518 - protein, 10 aa, synthetic construct
TYTRGDFNNL

SEQ ID NO: 154519 - protein, 10 aa, synthetic construct
TYFRGDFNNL

SEQ ID NO: 154520 - protein, 10 aa, synthetic construct
TYGRGDFNNL

SEQ ID NO: 154521 - protein, 10 aa, synthetic construct
TYHRGDFNNL

SEQ ID NO: 154522 - protein, 10 aa, synthetic construct
TYIRGDFNNL

SEQ ID NO: 154523 - protein, 10 aa, synthetic construct
TYKRGDFNNL

SEQ ID NO: 154524 - protein, 10 aa, synthetic construct
TYLRGDFNNL

SEQ ID NO: 154525 - protein, 10 aa, synthetic construct
TYMRGDFNNL

SEQ ID NO: 154526 - protein, 10 aa, synthetic construct
TYPRGDFNNL

SEQ ID NO: 154527 - protein, 10 aa, synthetic construct
TYRRGDFNNL

SEQ ID NO: 154528 - protein, 10 aa, synthetic construct
TYVRGDFNNL

SEQ ID NO: 154529 - protein, 10 aa, synthetic construct
TYWRGDFNNL

SEQ ID NO: 154530 - protein, 10 aa, synthetic construct
TYYRGDFNNL

SEQ ID NO: 154531 - protein, 10 aa, synthetic construct
AAARGDFNNT

SEQ ID NO: 154532 - protein, 10 aa, synthetic construct
AADRGDFNNT

SEQ ID NO: 154533 - protein, 10 aa, synthetic construct
AAERGDFNNT

SEQ ID NO: 154534 - protein, 10 aa, synthetic construct
AANRGDFNNT

SEQ ID NO: 154535 - protein, 10 aa, synthetic construct
AAQRGDFNNT

SEQ ID NO: 154536 - protein, 10 aa, synthetic construct
AASRGDFNNT

SEQ ID NO: 154537 - protein, 10 aa, synthetic construct
AATRGDFNNT

SEQ ID NO: 154538 - protein, 10 aa, synthetic construct
AAFRGDFNNT

SEQ ID NO: 154539 - protein, 10 aa, synthetic construct
AAGRGDFNNT

SEQ ID NO: 154540 - protein, 10 aa, synthetic construct
AAHRGDFNNT

SEQ ID NO: 154541 - protein, 10 aa, synthetic construct
AAIRGDFNNT

SEQ ID NO: 154542 - protein, 10 aa, synthetic construct
AAKRGDFNNT

SEQ ID NO: 154543 - protein, 10 aa, synthetic construct
AALRGDFNNT

SEQ ID NO: 154544 - protein, 10 aa, synthetic construct
AAMRGDFNNT

SEQ ID NO: 154545 - protein, 10 aa, synthetic construct
AAPRGDFNNT

SEQ ID NO: 154546 - protein, 10 aa, synthetic construct
AARRGDFNNT

SEQ ID NO: 154547 - protein, 10 aa, synthetic construct
AAVRGDFNNT

SEQ ID NO: 154548 - protein, 10 aa, synthetic construct
AAWRGDFNNT

SEQ ID NO: 154549 - protein, 10 aa, synthetic construct
AAYRGDFNNT

SEQ ID NO: 154550 - protein, 10 aa, synthetic construct
ADARGDFNNT

SEQ ID NO: 154551 - protein, 10 aa, synthetic construct
ADDRGDFNNT

SEQ ID NO: 154552 - protein, 10 aa, synthetic construct
ADERGDFNNT

SEQ ID NO: 154553 - protein, 10 aa, synthetic construct
ADNRGDFNNT

SEQ ID NO: 154554 - protein, 10 aa, synthetic construct
ADQRGDFNNT

SEQ ID NO: 154555 - protein, 10 aa, synthetic construct
ADSRGDFNNT

SEQ ID NO: 154556 - protein, 10 aa, synthetic construct
ADTRGDFNNT

SEQ ID NO: 154557 - protein, 10 aa, synthetic construct
ADFRGDFNNT

SEQ ID NO: 154558 - protein, 10 aa, synthetic construct
ADGRGDFNNT

SEQ ID NO: 154559 - protein, 10 aa, synthetic construct
ADHRGDFNNT

SEQ ID NO: 154560 - protein, 10 aa, synthetic construct
ADIRGDFNNT

SEQ ID NO: 154561 - protein, 10 aa, synthetic construct
ADKRGDFNNT

SEQ ID NO: 154562 - protein, 10 aa, synthetic construct
ADLRGDFNNT

SEQ ID NO: 154563 - protein, 10 aa, synthetic construct
ADMRGDFNNT

SEQ ID NO: 154564 - protein, 10 aa, synthetic construct
ADPRGDFNNT

SEQ ID NO: 154565 - protein, 10 aa, synthetic construct
ADRRGDFNNT

SEQ ID NO: 154566 - protein, 10 aa, synthetic construct
ADVRGDFNNT

SEQ ID NO: 154567 - protein, 10 aa, synthetic construct
ADWRGDFNNT

SEQ ID NO: 154568 - protein, 10 aa, synthetic construct
ADYRGDFNNT

SEQ ID NO: 154569 - protein, 10 aa, synthetic construct
AEARGDFNNT

SEQ ID NO: 154570 - protein, 10 aa, synthetic construct
AEDRGDFNNT

SEQ ID NO: 154571 - protein, 10 aa, synthetic construct
AEERGDFNNT

SEQ ID NO: 154572 - protein, 10 aa, synthetic construct
AENRGDFNNT

SEQ ID NO: 154573 - protein, 10 aa, synthetic construct
AEQRGDFNNT

SEQ ID NO: 154574 - protein, 10 aa, synthetic construct
AESRGDFNNT

SEQ ID NO: 154575 - protein, 10 aa, synthetic construct
AETRGDFNNT

SEQ ID NO: 154576 - protein, 10 aa, synthetic construct
AEFRGDFNNT

SEQ ID NO: 154577 - protein, 10 aa, synthetic construct
AEGRGDFNNT

SEQ ID NO: 154578 - protein, 10 aa, synthetic construct
AEHRGDFNNT

SEQ ID NO: 154579 - protein, 10 aa, synthetic construct
AEIRGDFNNT

SEQ ID NO: 154580 - protein, 10 aa, synthetic construct
AEKRGDFNNT

SEQ ID NO: 154581 - protein, 10 aa, synthetic construct
AELRGDFNNT

SEQ ID NO: 154582 - protein, 10 aa, synthetic construct
AEMRGDFNNT

SEQ ID NO: 154583 - protein, 10 aa, synthetic construct
AEPRGDFNNT

SEQ ID NO: 154584 - protein, 10 aa, synthetic construct
AERRGDFNNT

SEQ ID NO: 154585 - protein, 10 aa, synthetic construct
AEVRGDFNNT

SEQ ID NO: 154586 - protein, 10 aa, synthetic construct
AEWRGDFNNT

SEQ ID NO: 154587 - protein, 10 aa, synthetic construct
AEYRGDFNNT

SEQ ID NO: 154588 - protein, 10 aa, synthetic construct
ANARGDFNNT

SEQ ID NO: 154589 - protein, 10 aa, synthetic construct
ANDRGDFNNT

SEQ ID NO: 154590 - protein, 10 aa, synthetic construct
ANERGDFNNT

SEQ ID NO: 154591 - protein, 10 aa, synthetic construct
ANNRGDFNNT

SEQ ID NO: 154592 - protein, 10 aa, synthetic construct
ANQRGDFNNT

SEQ ID NO: 154593 - protein, 10 aa, synthetic construct
ANSRGDFNNT

SEQ ID NO: 154594 - protein, 10 aa, synthetic construct
ANTRGDFNNT

SEQ ID NO: 154595 - protein, 10 aa, synthetic construct
ANFRGDFNNT

SEQ ID NO: 154596 - protein, 10 aa, synthetic construct
ANGRGDFNNT

SEQ ID NO: 154597 - protein, 10 aa, synthetic construct
ANHRGDFNNT

SEQ ID NO: 154598 - protein, 10 aa, synthetic construct
ANIRGDFNNT

SEQ ID NO: 154599 - protein, 10 aa, synthetic construct
ANKRGDFNNT

SEQ ID NO: 154600 - protein, 10 aa, synthetic construct
ANLRGDFNNT

SEQ ID NO: 154601 - protein, 10 aa, synthetic construct
ANMRGDFNNT

SEQ ID NO: 154602 - protein, 10 aa, synthetic construct
ANPRGDFNNT

SEQ ID NO: 154603 - protein, 10 aa, synthetic construct
ANRRGDFNNT

SEQ ID NO: 154604 - protein, 10 aa, synthetic construct
ANVRGDFNNT

SEQ ID NO: 154605 - protein, 10 aa, synthetic construct
ANWRGDFNNT

SEQ ID NO: 154606 - protein, 10 aa, synthetic construct
ANYRGDFNNT

SEQ ID NO: 154607 - protein, 10 aa, synthetic construct
AQARGDFNNT

SEQ ID NO: 154608 - protein, 10 aa, synthetic construct
AQDRGDFNNT

SEQ ID NO: 154609 - protein, 10 aa, synthetic construct
AQERGDFNNT

SEQ ID NO: 154610 - protein, 10 aa, synthetic construct
AQNRGDFNNT

SEQ ID NO: 154611 - protein, 10 aa, synthetic construct
AQQRGDFNNT

SEQ ID NO: 154612 - protein, 10 aa, synthetic construct
AQSRGDFNNT

SEQ ID NO: 154613 - protein, 10 aa, synthetic construct
AQTRGDFNNT

SEQ ID NO: 154614 - protein, 10 aa, synthetic construct
AQFRGDFNNT

SEQ ID NO: 154615 - protein, 10 aa, synthetic construct
AQGRGDFNNT

SEQ ID NO: 154616 - protein, 10 aa, synthetic construct
AQHRGDFNNT

SEQ ID NO: 154617 - protein, 10 aa, synthetic construct
AQIRGDFNNT

SEQ ID NO: 154618 - protein, 10 aa, synthetic construct
AQKRGDFNNT

SEQ ID NO: 154619 - protein, 10 aa, synthetic construct
AQLRGDFNNT

SEQ ID NO: 154620 - protein, 10 aa, synthetic construct
AQMRGDFNNT

SEQ ID NO: 154621 - protein, 10 aa, synthetic construct
AQPRGDFNNT

SEQ ID NO: 154622 - protein, 10 aa, synthetic construct
AQRRGDFNNT

SEQ ID NO: 154623 - protein, 10 aa, synthetic construct
AQVRGDFNNT

SEQ ID NO: 154624 - protein, 10 aa, synthetic construct
AQWRGDFNNT

SEQ ID NO: 154625 - protein, 10 aa, synthetic construct
AQYRGDFNNT

SEQ ID NO: 154626 - protein, 10 aa, synthetic construct
ASARGDFNNT

SEQ ID NO: 154627 - protein, 10 aa, synthetic construct
ASDRGDFNNT

SEQ ID NO: 154628 - protein, 10 aa, synthetic construct
ASERGDFNNT

SEQ ID NO: 154629 - protein, 10 aa, synthetic construct
ASNRGDFNNT

SEQ ID NO: 154630 - protein, 10 aa, synthetic construct
ASQRGDFNNT

SEQ ID NO: 154631 - protein, 10 aa, synthetic construct
ASSRGDFNNT

SEQ ID NO: 154632 - protein, 10 aa, synthetic construct
ASTRGDFNNT

SEQ ID NO: 154633 - protein, 10 aa, synthetic construct
ASFRGDFNNT

SEQ ID NO: 154634 - protein, 10 aa, synthetic construct
ASGRGDFNNT

SEQ ID NO: 154635 - protein, 10 aa, synthetic construct
ASHRGDFNNT

SEQ ID NO: 154636 - protein, 10 aa, synthetic construct
ASIRGDFNNT

SEQ ID NO: 154637 - protein, 10 aa, synthetic construct
ASKRGDFNNT

SEQ ID NO: 154638 - protein, 10 aa, synthetic construct
ASLRGDFNNT

SEQ ID NO: 154639 - protein, 10 aa, synthetic construct
ASMRGDFNNT

SEQ ID NO: 154640 - protein, 10 aa, synthetic construct
ASPRGDFNNT

SEQ ID NO: 154641 - protein, 10 aa, synthetic construct
ASRRGDFNNT

SEQ ID NO: 154642 - protein, 10 aa, synthetic construct
ASVRGDFNNT

SEQ ID NO: 154643 - protein, 10 aa, synthetic construct
ASWRGDFNNT

SEQ ID NO: 154644 - protein, 10 aa, synthetic construct
ASYRGDFNNT

SEQ ID NO: 154645 - protein, 10 aa, synthetic construct
ATARGDFNNT

SEQ ID NO: 154646 - protein, 10 aa, synthetic construct
ATDRGDFNNT

SEQ ID NO: 154647 - protein, 10 aa, synthetic construct
ATERGDFNNT

SEQ ID NO: 154648 - protein, 10 aa, synthetic construct
ATNRGDFNNT

SEQ ID NO: 154649 - protein, 10 aa, synthetic construct
ATQRGDFNNT

SEQ ID NO: 154650 - protein, 10 aa, synthetic construct
ATSRGDFNNT

SEQ ID NO: 154651 - protein, 10 aa, synthetic construct
ATTRGDFNNT

SEQ ID NO: 154652 - protein, 10 aa, synthetic construct
ATFRGDFNNT

SEQ ID NO: 154653 - protein, 10 aa, synthetic construct
ATGRGDFNNT

SEQ ID NO: 154654 - protein, 10 aa, synthetic construct
ATHRGDFNNT

SEQ ID NO: 154655 - protein, 10 aa, synthetic construct
ATIRGDFNNT

SEQ ID NO: 154656 - protein, 10 aa, synthetic construct
ATKRGDFNNT

SEQ ID NO: 154657 - protein, 10 aa, synthetic construct
ATLRGDFNNT

SEQ ID NO: 154658 - protein, 10 aa, synthetic construct
ATMRGDFNNT

SEQ ID NO: 154659 - protein, 10 aa, synthetic construct
ATPRGDFNNT

SEQ ID NO: 154660 - protein, 10 aa, synthetic construct
ATRRGDFNNT

SEQ ID NO: 154661 - protein, 10 aa, synthetic construct
ATVRGDFNNT

SEQ ID NO: 154662 - protein, 10 aa, synthetic construct
ATWRGDFNNT

SEQ ID NO: 154663 - protein, 10 aa, synthetic construct
ATYRGDFNNT

SEQ ID NO: 154664 - protein, 10 aa, synthetic construct
AFARGDFNNT

SEQ ID NO: 154665 - protein, 10 aa, synthetic construct
AFDRGDFNNT

SEQ ID NO: 154666 - protein, 10 aa, synthetic construct
AFERGDFNNT

SEQ ID NO: 154667 - protein, 10 aa, synthetic construct
AFNRGDFNNT

SEQ ID NO: 154668 - protein, 10 aa, synthetic construct
AFQRGDFNNT

SEQ ID NO: 154669 - protein, 10 aa, synthetic construct
AFSRGDFNNT

SEQ ID NO: 154670 - protein, 10 aa, synthetic construct
AFTRGDFNNT

SEQ ID NO: 154671 - protein, 10 aa, synthetic construct
AFFRGDFNNT

SEQ ID NO: 154672 - protein, 10 aa, synthetic construct
AFGRGDFNNT

SEQ ID NO: 154673 - protein, 10 aa, synthetic construct
AFHRGDFNNT

SEQ ID NO: 154674 - protein, 10 aa, synthetic construct
AFIRGDFNNT

SEQ ID NO: 154675 - protein, 10 aa, synthetic construct
AFKRGDFNNT

SEQ ID NO: 154676 - protein, 10 aa, synthetic construct
AFLRGDFNNT

SEQ ID NO: 154677 - protein, 10 aa, synthetic construct
AFMRGDFNNT

SEQ ID NO: 154678 - protein, 10 aa, synthetic construct
AFPRGDFNNT

SEQ ID NO: 154679 - protein, 10 aa, synthetic construct
AFRRGDFNNT

SEQ ID NO: 154680 - protein, 10 aa, synthetic construct
AFVRGDFNNT

SEQ ID NO: 154681 - protein, 10 aa, synthetic construct
AFWRGDFNNT

SEQ ID NO: 154682 - protein, 10 aa, synthetic construct
AFYRGDFNNT

SEQ ID NO: 154683 - protein, 10 aa, synthetic construct
AGARGDFNNT

SEQ ID NO: 154684 - protein, 10 aa, synthetic construct
AGDRGDFNNT

SEQ ID NO: 154685 - protein, 10 aa, synthetic construct
AGERGDFNNT

SEQ ID NO: 154686 - protein, 10 aa, synthetic construct
AGNRGDFNNT

SEQ ID NO: 154687 - protein, 10 aa, synthetic construct
AGQRGDFNNT

SEQ ID NO: 154688 - protein, 10 aa, synthetic construct
AGSRGDFNNT

SEQ ID NO: 154689 - protein, 10 aa, synthetic construct
AGTRGDFNNT

SEQ ID NO: 154690 - protein, 10 aa, synthetic construct
AGFRGDFNNT

SEQ ID NO: 154691 - protein, 10 aa, synthetic construct
AGGRGDFNNT

SEQ ID NO: 154692 - protein, 10 aa, synthetic construct
AGHRGDFNNT

SEQ ID NO: 154693 - protein, 10 aa, synthetic construct
AGIRGDFNNT

SEQ ID NO: 154694 - protein, 10 aa, synthetic construct
AGKRGDFNNT

SEQ ID NO: 154695 - protein, 10 aa, synthetic construct
AGLRGDFNNT

SEQ ID NO: 154696 - protein, 10 aa, synthetic construct
AGMRGDFNNT

SEQ ID NO: 154697 - protein, 10 aa, synthetic construct
AGPRGDFNNT

SEQ ID NO: 154698 - protein, 10 aa, synthetic construct
AGRRGDFNNT

SEQ ID NO: 154699 - protein, 10 aa, synthetic construct
AGVRGDFNNT

SEQ ID NO: 154700 - protein, 10 aa, synthetic construct
AGWRGDFNNT

SEQ ID NO: 154701 - protein, 10 aa, synthetic construct
AGYRGDFNNT

SEQ ID NO: 154702 - protein, 10 aa, synthetic construct
AHARGDFNNT

SEQ ID NO: 154703 - protein, 10 aa, synthetic construct
AHDRGDFNNT

SEQ ID NO: 154704 - protein, 10 aa, synthetic construct
AHERGDFNNT

SEQ ID NO: 154705 - protein, 10 aa, synthetic construct
AHNRGDFNNT

SEQ ID NO: 154706 - protein, 10 aa, synthetic construct
AHQRGDFNNT

SEQ ID NO: 154707 - protein, 10 aa, synthetic construct
AHSRGDFNNT

SEQ ID NO: 154708 - protein, 10 aa, synthetic construct
AHTRGDFNNT

SEQ ID NO: 154709 - protein, 10 aa, synthetic construct
AHFRGDFNNT

SEQ ID NO: 154710 - protein, 10 aa, synthetic construct
AHGRGDFNNT

SEQ ID NO: 154711 - protein, 10 aa, synthetic construct
AHHRGDFNNT

SEQ ID NO: 154712 - protein, 10 aa, synthetic construct
AHIRGDFNNT

SEQ ID NO: 154713 - protein, 10 aa, synthetic construct
AHKRGDFNNT

SEQ ID NO: 154714 - protein, 10 aa, synthetic construct
AHLRGDFNNT

SEQ ID NO: 154715 - protein, 10 aa, synthetic construct
AHMRGDFNNT

SEQ ID NO: 154716 - protein, 10 aa, synthetic construct
AHPRGDFNNT

SEQ ID NO: 154717 - protein, 10 aa, synthetic construct
AHRRGDFNNT

SEQ ID NO: 154718 - protein, 10 aa, synthetic construct
AHVRGDFNNT

SEQ ID NO: 154719 - protein, 10 aa, synthetic construct
AHWRGDFNNT

SEQ ID NO: 154720 - protein, 10 aa, synthetic construct
AHYRGDFNNT

SEQ ID NO: 154721 - protein, 10 aa, synthetic construct
AIARGDFNNT

SEQ ID NO: 154722 - protein, 10 aa, synthetic construct
AIDRGDFNNT

SEQ ID NO: 154723 - protein, 10 aa, synthetic construct
AIERGDFNNT

SEQ ID NO: 154724 - protein, 10 aa, synthetic construct
AINRGDFNNT

SEQ ID NO: 154725 - protein, 10 aa, synthetic construct
AIQRGDFNNT

SEQ ID NO: 154726 - protein, 10 aa, synthetic construct
AISRGDFNNT

SEQ ID NO: 154727 - protein, 10 aa, synthetic construct
AITRGDFNNT

SEQ ID NO: 154728 - protein, 10 aa, synthetic construct
AIFRGDFNNT

SEQ ID NO: 154729 - protein, 10 aa, synthetic construct
AIGRGDFNNT

SEQ ID NO: 154730 - protein, 10 aa, synthetic construct
AIHRGDFNNT

SEQ ID NO: 154731 - protein, 10 aa, synthetic construct
AIIRGDFNNT

SEQ ID NO: 154732 - protein, 10 aa, synthetic construct
AIKRGDFNNT

SEQ ID NO: 154733 - protein, 10 aa, synthetic construct
AILRGDFNNT

SEQ ID NO: 154734 - protein, 10 aa, synthetic construct
AIMRGDFNNT

SEQ ID NO: 154735 - protein, 10 aa, synthetic construct
AIPRGDFNNT

SEQ ID NO: 154736 - protein, 10 aa, synthetic construct
AIRRGDFNNT

SEQ ID NO: 154737 - protein, 10 aa, synthetic construct
AIVRGDFNNT

SEQ ID NO: 154738 - protein, 10 aa, synthetic construct
AIWRGDFNNT

SEQ ID NO: 154739 - protein, 10 aa, synthetic construct
AIYRGDFNNT

SEQ ID NO: 154740 - protein, 10 aa, synthetic construct
AKARGDFNNT

SEQ ID NO: 154741 - protein, 10 aa, synthetic construct
AKDRGDFNNT

SEQ ID NO: 154742 - protein, 10 aa, synthetic construct
AKERGDFNNT

SEQ ID NO: 154743 - protein, 10 aa, synthetic construct
AKNRGDFNNT

SEQ ID NO: 154744 - protein, 10 aa, synthetic construct
AKQRGDFNNT

SEQ ID NO: 154745 - protein, 10 aa, synthetic construct
AKSRGDFNNT

SEQ ID NO: 154746 - protein, 10 aa, synthetic construct
AKTRGDFNNT

SEQ ID NO: 154747 - protein, 10 aa, synthetic construct
AKFRGDFNNT

SEQ ID NO: 154748 - protein, 10 aa, synthetic construct
AKGRGDFNNT

SEQ ID NO: 154749 - protein, 10 aa, synthetic construct
AKHRGDFNNT

SEQ ID NO: 154750 - protein, 10 aa, synthetic construct
AKIRGDFNNT

SEQ ID NO: 154751 - protein, 10 aa, synthetic construct
AKKRGDFNNT

SEQ ID NO: 154752 - protein, 10 aa, synthetic construct
AKLRGDFNNT

SEQ ID NO: 154753 - protein, 10 aa, synthetic construct
AKMRGDFNNT

SEQ ID NO: 154754 - protein, 10 aa, synthetic construct
AKPRGDFNNT

SEQ ID NO: 154755 - protein, 10 aa, synthetic construct
AKRRGDFNNT

SEQ ID NO: 154756 - protein, 10 aa, synthetic construct
AKVRGDFNNT

SEQ ID NO: 154757 - protein, 10 aa, synthetic construct
AKWRGDFNNT

SEQ ID NO: 154758 - protein, 10 aa, synthetic construct
AKYRGDFNNT

SEQ ID NO: 154759 - protein, 10 aa, synthetic construct
ALARGDFNNT

SEQ ID NO: 154760 - protein, 10 aa, synthetic construct
ALDRGDFNNT

SEQ ID NO: 154761 - protein, 10 aa, synthetic construct
ALERGDFNNT

SEQ ID NO: 154762 - protein, 10 aa, synthetic construct
ALNRGDFNNT

SEQ ID NO: 154763 - protein, 10 aa, synthetic construct
ALQRGDFNNT

SEQ ID NO: 154764 - protein, 10 aa, synthetic construct
ALSRGDFNNT

SEQ ID NO: 154765 - protein, 10 aa, synthetic construct
ALTRGDFNNT

SEQ ID NO: 154766 - protein, 10 aa, synthetic construct
ALFRGDFNNT

SEQ ID NO: 154767 - protein, 10 aa, synthetic construct
ALGRGDFNNT

SEQ ID NO: 154768 - protein, 10 aa, synthetic construct
ALHRGDFNNT

SEQ ID NO: 154769 - protein, 10 aa, synthetic construct
ALIRGDFNNT

SEQ ID NO: 154770 - protein, 10 aa, synthetic construct
ALKRGDFNNT

SEQ ID NO: 154771 - protein, 10 aa, synthetic construct
ALLRGDFNNT

SEQ ID NO: 154772 - protein, 10 aa, synthetic construct
ALMRGDFNNT

SEQ ID NO: 154773 - protein, 10 aa, synthetic construct
ALPRGDFNNT

SEQ ID NO: 154774 - protein, 10 aa, synthetic construct
ALRRGDFNNT

SEQ ID NO: 154775 - protein, 10 aa, synthetic construct
ALVRGDFNNT

SEQ ID NO: 154776 - protein, 10 aa, synthetic construct
ALWRGDFNNT

SEQ ID NO: 154777 - protein, 10 aa, synthetic construct
ALYRGDFNNT

SEQ ID NO: 154778 - protein, 10 aa, synthetic construct
AMARGDFNNT

SEQ ID NO: 154779 - protein, 10 aa, synthetic construct
AMDRGDFNNT

SEQ ID NO: 154780 - protein, 10 aa, synthetic construct
AMERGDFNNT

SEQ ID NO: 154781 - protein, 10 aa, synthetic construct
AMNRGDFNNT

SEQ ID NO: 154782 - protein, 10 aa, synthetic construct
AMQRGDFNNT

SEQ ID NO: 154783 - protein, 10 aa, synthetic construct
AMSRGDFNNT

SEQ ID NO: 154784 - protein, 10 aa, synthetic construct
AMTRGDFNNT

SEQ ID NO: 154785 - protein, 10 aa, synthetic construct
AMFRGDFNNT

SEQ ID NO: 154786 - protein, 10 aa, synthetic construct
AMGRGDFNNT

SEQ ID NO: 154787 - protein, 10 aa, synthetic construct
AMHRGDFNNT

SEQ ID NO: 154788 - protein, 10 aa, synthetic construct
AMIRGDFNNT

SEQ ID NO: 154789 - protein, 10 aa, synthetic construct
AMKRGDFNNT

SEQ ID NO: 154790 - protein, 10 aa, synthetic construct
AMLRGDFNNT

SEQ ID NO: 154791 - protein, 10 aa, synthetic construct
AMMRGDFNNT

SEQ ID NO: 154792 - protein, 10 aa, synthetic construct
AMPRGDFNNT

SEQ ID NO: 154793 - protein, 10 aa, synthetic construct
AMRRGDFNNT

SEQ ID NO: 154794 - protein, 10 aa, synthetic construct
AMVRGDFNNT

SEQ ID NO: 154795 - protein, 10 aa, synthetic construct
AMWRGDFNNT

SEQ ID NO: 154796 - protein, 10 aa, synthetic construct
AMYRGDFNNT

SEQ ID NO: 154797 - protein, 10 aa, synthetic construct
APARGDFNNT

SEQ ID NO: 154798 - protein, 10 aa, synthetic construct
APDRGDFNNT

SEQ ID NO: 154799 - protein, 10 aa, synthetic construct
APERGDFNNT

SEQ ID NO: 154800 - protein, 10 aa, synthetic construct
APNRGDFNNT

SEQ ID NO: 154801 - protein, 10 aa, synthetic construct
APQRGDFNNT

SEQ ID NO: 154802 - protein, 10 aa, synthetic construct
APSRGDFNNT

SEQ ID NO: 154803 - protein, 10 aa, synthetic construct
APTRGDFNNT

SEQ ID NO: 154804 - protein, 10 aa, synthetic construct
APFRGDFNNT

SEQ ID NO: 154805 - protein, 10 aa, synthetic construct
APGRGDFNNT

SEQ ID NO: 154806 - protein, 10 aa, synthetic construct
APHRGDFNNT

SEQ ID NO: 154807 - protein, 10 aa, synthetic construct
APIRGDFNNT

SEQ ID NO: 154808 - protein, 10 aa, synthetic construct
APKRGDFNNT

SEQ ID NO: 154809 - protein, 10 aa, synthetic construct
APLRGDFNNT

SEQ ID NO: 154810 - protein, 10 aa, synthetic construct
APMRGDFNNT

SEQ ID NO: 154811 - protein, 10 aa, synthetic construct
APPRGDFNNT

SEQ ID NO: 154812 - protein, 10 aa, synthetic construct
APRRGDFNNT

SEQ ID NO: 154813 - protein, 10 aa, synthetic construct
APVRGDFNNT

SEQ ID NO: 154814 - protein, 10 aa, synthetic construct
APWRGDFNNT

SEQ ID NO: 154815 - protein, 10 aa, synthetic construct
APYRGDFNNT

SEQ ID NO: 154816 - protein, 10 aa, synthetic construct
ARARGDFNNT

SEQ ID NO: 154817 - protein, 10 aa, synthetic construct
ARDRGDFNNT

SEQ ID NO: 154818 - protein, 10 aa, synthetic construct
ARERGDFNNT

SEQ ID NO: 154819 - protein, 10 aa, synthetic construct
ARNRGDFNNT

SEQ ID NO: 154820 - protein, 10 aa, synthetic construct
ARQRGDFNNT

SEQ ID NO: 154821 - protein, 10 aa, synthetic construct
ARSRGDFNNT

SEQ ID NO: 154822 - protein, 10 aa, synthetic construct
ARTRGDFNNT

SEQ ID NO: 154823 - protein, 10 aa, synthetic construct
ARFRGDFNNT

SEQ ID NO: 154824 - protein, 10 aa, synthetic construct
ARGRGDFNNT

SEQ ID NO: 154825 - protein, 10 aa, synthetic construct
ARHRGDFNNT

SEQ ID NO: 154826 - protein, 10 aa, synthetic construct
ARIRGDFNNT

SEQ ID NO: 154827 - protein, 10 aa, synthetic construct
ARKRGDFNNT

SEQ ID NO: 154828 - protein, 10 aa, synthetic construct
ARLRGDFNNT

SEQ ID NO: 154829 - protein, 10 aa, synthetic construct
ARMRGDFNNT

SEQ ID NO: 154830 - protein, 10 aa, synthetic construct
ARPRGDFNNT

SEQ ID NO: 154831 - protein, 10 aa, synthetic construct
ARRRGDFNNT

SEQ ID NO: 154832 - protein, 10 aa, synthetic construct
ARVRGDFNNT

SEQ ID NO: 154833 - protein, 10 aa, synthetic construct
ARWRGDFNNT

SEQ ID NO: 154834 - protein, 10 aa, synthetic construct
ARYRGDFNNT

SEQ ID NO: 154835 - protein, 10 aa, synthetic construct
AVARGDFNNT

SEQ ID NO: 154836 - protein, 10 aa, synthetic construct
AVDRGDFNNT

SEQ ID NO: 154837 - protein, 10 aa, synthetic construct
AVERGDFNNT

SEQ ID NO: 154838 - protein, 10 aa, synthetic construct
AVNRGDFNNT

SEQ ID NO: 154839 - protein, 10 aa, synthetic construct
AVQRGDFNNT

SEQ ID NO: 154840 - protein, 10 aa, synthetic construct
AVSRGDFNNT

SEQ ID NO: 154841 - protein, 10 aa, synthetic construct
AVTRGDFNNT

SEQ ID NO: 154842 - protein, 10 aa, synthetic construct
AVFRGDFNNT

SEQ ID NO: 154843 - protein, 10 aa, synthetic construct
AVGRGDFNNT

SEQ ID NO: 154844 - protein, 10 aa, synthetic construct
AVHRGDFNNT

SEQ ID NO: 154845 - protein, 10 aa, synthetic construct
AVIRGDFNNT

SEQ ID NO: 154846 - protein, 10 aa, synthetic construct
AVKRGDFNNT

SEQ ID NO: 154847 - protein, 10 aa, synthetic construct
AVLRGDFNNT

SEQ ID NO: 154848 - protein, 10 aa, synthetic construct
AVMRGDFNNT

SEQ ID NO: 154849 - protein, 10 aa, synthetic construct
AVPRGDFNNT

SEQ ID NO: 154850 - protein, 10 aa, synthetic construct
AVRRGDFNNT

SEQ ID NO: 154851 - protein, 10 aa, synthetic construct
AVVRGDFNNT

SEQ ID NO: 154852 - protein, 10 aa, synthetic construct
AVWRGDFNNT

SEQ ID NO: 154853 - protein, 10 aa, synthetic construct
AVYRGDFNNT

SEQ ID NO: 154854 - protein, 10 aa, synthetic construct
AWARGDFNNT

SEQ ID NO: 154855 - protein, 10 aa, synthetic construct
AWDRGDFNNT

SEQ ID NO: 154856 - protein, 10 aa, synthetic construct
AWERGDFNNT

SEQ ID NO: 154857 - protein, 10 aa, synthetic construct
AWNRGDFNNT

SEQ ID NO: 154858 - protein, 10 aa, synthetic construct
AWQRGDFNNT

SEQ ID NO: 154859 - protein, 10 aa, synthetic construct
AWSRGDFNNT

SEQ ID NO: 154860 - protein, 10 aa, synthetic construct
AWTRGDFNNT

SEQ ID NO: 154861 - protein, 10 aa, synthetic construct
AWFRGDFNNT

SEQ ID NO: 154862 - protein, 10 aa, synthetic construct
AWGRGDFNNT

SEQ ID NO: 154863 - protein, 10 aa, synthetic construct
AWHRGDFNNT

SEQ ID NO: 154864 - protein, 10 aa, synthetic construct
AWIRGDFNNT

SEQ ID NO: 154865 - protein, 10 aa, synthetic construct
AWKRGDFNNT

SEQ ID NO: 154866 - protein, 10 aa, synthetic construct
AWLRGDFNNT

SEQ ID NO: 154867 - protein, 10 aa, synthetic construct
AWMRGDFNNT

SEQ ID NO: 154868 - protein, 10 aa, synthetic construct
AWPRGDFNNT

SEQ ID NO: 154869 - protein, 10 aa, synthetic construct
AWRRGDFNNT

SEQ ID NO: 154870 - protein, 10 aa, synthetic construct
AWVRGDFNNT

SEQ ID NO: 154871 - protein, 10 aa, synthetic construct
AWWRGDFNNT

SEQ ID NO: 154872 - protein, 10 aa, synthetic construct
AWYRGDFNNT

SEQ ID NO: 154873 - protein, 10 aa, synthetic construct
AYARGDFNNT

SEQ ID NO: 154874 - protein, 10 aa, synthetic construct
AYDRGDFNNT

SEQ ID NO: 154875 - protein, 10 aa, synthetic construct
AYERGDFNNT

SEQ ID NO: 154876 - protein, 10 aa, synthetic construct
AYNRGDFNNT

SEQ ID NO: 154877 - protein, 10 aa, synthetic construct
AYQRGDFNNT

SEQ ID NO: 154878 - protein, 10 aa, synthetic construct
AYSRGDFNNT

SEQ ID NO: 154879 - protein, 10 aa, synthetic construct
AYTRGDFNNT

SEQ ID NO: 154880 - protein, 10 aa, synthetic construct
AYFRGDFNNT

SEQ ID NO: 154881 - protein, 10 aa, synthetic construct
AYGRGDFNNT

SEQ ID NO: 154882 - protein, 10 aa, synthetic construct
AYHRGDFNNT

SEQ ID NO: 154883 - protein, 10 aa, synthetic construct
AYIRGDFNNT

SEQ ID NO: 154884 - protein, 10 aa, synthetic construct
AYKRGDFNNT

SEQ ID NO: 154885 - protein, 10 aa, synthetic construct
AYLRGDFNNT

SEQ ID NO: 154886 - protein, 10 aa, synthetic construct
AYMRGDFNNT

SEQ ID NO: 154887 - protein, 10 aa, synthetic construct
AYPRGDFNNT

SEQ ID NO: 154888 - protein, 10 aa, synthetic construct
AYRRGDFNNT

SEQ ID NO: 154889 - protein, 10 aa, synthetic construct
AYVRGDFNNT

SEQ ID NO: 154890 - protein, 10 aa, synthetic construct
AYWRGDFNNT

SEQ ID NO: 154891 - protein, 10 aa, synthetic construct
AYYRGDFNNT

SEQ ID NO: 154892 - protein, 10 aa, synthetic construct
DAARGDFNNT

SEQ ID NO: 154893 - protein, 10 aa, synthetic construct
DADRGDFNNT

SEQ ID NO: 154894 - protein, 10 aa, synthetic construct
DAERGDFNNT

SEQ ID NO: 154895 - protein, 10 aa, synthetic construct
DANRGDFNNT

SEQ ID NO: 154896 - protein, 10 aa, synthetic construct
DAQRGDFNNT

SEQ ID NO: 154897 - protein, 10 aa, synthetic construct
DASRGDFNNT

SEQ ID NO: 154898 - protein, 10 aa, synthetic construct
DATRGDFNNT

SEQ ID NO: 154899 - protein, 10 aa, synthetic construct
DAFRGDFNNT

SEQ ID NO: 154900 - protein, 10 aa, synthetic construct
DAGRGDFNNT

SEQ ID NO: 154901 - protein, 10 aa, synthetic construct
DAHRGDFNNT

SEQ ID NO: 154902 - protein, 10 aa, synthetic construct
DAIRGDFNNT

SEQ ID NO: 154903 - protein, 10 aa, synthetic construct
DAKRGDFNNT

SEQ ID NO: 154904 - protein, 10 aa, synthetic construct
DALRGDFNNT

SEQ ID NO: 154905 - protein, 10 aa, synthetic construct
DAMRGDFNNT

SEQ ID NO: 154906 - protein, 10 aa, synthetic construct
DAPRGDFNNT

SEQ ID NO: 154907 - protein, 10 aa, synthetic construct
DARRGDFNNT

SEQ ID NO: 154908 - protein, 10 aa, synthetic construct
DAVRGDFNNT

SEQ ID NO: 154909 - protein, 10 aa, synthetic construct
DAWRGDFNNT

SEQ ID NO: 154910 - protein, 10 aa, synthetic construct
DAYRGDFNNT

SEQ ID NO: 154911 - protein, 10 aa, synthetic construct
DDARGDFNNT

SEQ ID NO: 154912 - protein, 10 aa, synthetic construct
DDDRGDFNNT

SEQ ID NO: 154913 - protein, 10 aa, synthetic construct
DDERGDFNNT

SEQ ID NO: 154914 - protein, 10 aa, synthetic construct
DDNRGDFNNT

SEQ ID NO: 154915 - protein, 10 aa, synthetic construct
DDQRGDFNNT

SEQ ID NO: 154916 - protein, 10 aa, synthetic construct
DDSRGDFNNT

SEQ ID NO: 154917 - protein, 10 aa, synthetic construct
DDTRGDFNNT

SEQ ID NO: 154918 - protein, 10 aa, synthetic construct
DDFRGDFNNT

SEQ ID NO: 154919 - protein, 10 aa, synthetic construct
DDGRGDFNNT

SEQ ID NO: 154920 - protein, 10 aa, synthetic construct
DDHRGDFNNT

SEQ ID NO: 154921 - protein, 10 aa, synthetic construct
DDIRGDFNNT

SEQ ID NO: 154922 - protein, 10 aa, synthetic construct
DDKRGDFNNT

SEQ ID NO: 154923 - protein, 10 aa, synthetic construct
DDLRGDFNNT

SEQ ID NO: 154924 - protein, 10 aa, synthetic construct
DDMRGDFNNT

SEQ ID NO: 154925 - protein, 10 aa, synthetic construct
DDPRGDFNNT

SEQ ID NO: 154926 - protein, 10 aa, synthetic construct
DDRRGDFNNT

SEQ ID NO: 154927 - protein, 10 aa, synthetic construct
DDVRGDFNNT

SEQ ID NO: 154928 - protein, 10 aa, synthetic construct
DDWRGDFNNT

SEQ ID NO: 154929 - protein, 10 aa, synthetic construct
DDYRGDFNNT

SEQ ID NO: 154930 - protein, 10 aa, synthetic construct
DEARGDFNNT

SEQ ID NO: 154931 - protein, 10 aa, synthetic construct
DEDRGDFNNT

SEQ ID NO: 154932 - protein, 10 aa, synthetic construct
DEERGDFNNT

SEQ ID NO: 154933 - protein, 10 aa, synthetic construct
DENRGDFNNT

SEQ ID NO: 154934 - protein, 10 aa, synthetic construct
DEQRGDFNNT

SEQ ID NO: 154935 - protein, 10 aa, synthetic construct
DESRGDFNNT

SEQ ID NO: 154936 - protein, 10 aa, synthetic construct
DETRGDFNNT

SEQ ID NO: 154937 - protein, 10 aa, synthetic construct
DEFRGDFNNT

SEQ ID NO: 154938 - protein, 10 aa, synthetic construct
DEGRGDFNNT

SEQ ID NO: 154939 - protein, 10 aa, synthetic construct
DEHRGDFNNT

SEQ ID NO: 154940 - protein, 10 aa, synthetic construct
DEIRGDFNNT

SEQ ID NO: 154941 - protein, 10 aa, synthetic construct
DEKRGDFNNT

SEQ ID NO: 154942 - protein, 10 aa, synthetic construct
DELRGDFNNT

SEQ ID NO: 154943 - protein, 10 aa, synthetic construct
DEMRGDFNNT

SEQ ID NO: 154944 - protein, 10 aa, synthetic construct
DEPRGDFNNT

SEQ ID NO: 154945 - protein, 10 aa, synthetic construct
DERRGDFNNT

SEQ ID NO: 154946 - protein, 10 aa, synthetic construct
DEVRGDFNNT

SEQ ID NO: 154947 - protein, 10 aa, synthetic construct
DEWRGDFNNT

SEQ ID NO: 154948 - protein, 10 aa, synthetic construct
DEYRGDFNNT

SEQ ID NO: 154949 - protein, 10 aa, synthetic construct
DNARGDFNNT

SEQ ID NO: 154950 - protein, 10 aa, synthetic construct
DNDRGDFNNT

SEQ ID NO: 154951 - protein, 10 aa, synthetic construct
DNERGDFNNT

SEQ ID NO: 154952 - protein, 10 aa, synthetic construct
DNNRGDFNNT

SEQ ID NO: 154953 - protein, 10 aa, synthetic construct
DNQRGDFNNT

SEQ ID NO: 154954 - protein, 10 aa, synthetic construct
DNSRGDFNNT

SEQ ID NO: 154955 - protein, 10 aa, synthetic construct
DNTRGDFNNT

SEQ ID NO: 154956 - protein, 10 aa, synthetic construct
DNFRGDFNNT

SEQ ID NO: 154957 - protein, 10 aa, synthetic construct
DNGRGDFNNT

SEQ ID NO: 154958 - protein, 10 aa, synthetic construct
DNHRGDFNNT

SEQ ID NO: 154959 - protein, 10 aa, synthetic construct
DNIRGDFNNT

SEQ ID NO: 154960 - protein, 10 aa, synthetic construct
DNKRGDFNNT

SEQ ID NO: 154961 - protein, 10 aa, synthetic construct
DNLRGDFNNT

SEQ ID NO: 154962 - protein, 10 aa, synthetic construct
DNMRGDFNNT

SEQ ID NO: 154963 - protein, 10 aa, synthetic construct
DNPRGDFNNT

SEQ ID NO: 154964 - protein, 10 aa, synthetic construct
DNRRGDFNNT

SEQ ID NO: 154965 - protein, 10 aa, synthetic construct
DNVRGDFNNT

SEQ ID NO: 154966 - protein, 10 aa, synthetic construct
DNWRGDFNNT

SEQ ID NO: 154967 - protein, 10 aa, synthetic construct
DNYRGDFNNT

SEQ ID NO: 154968 - protein, 10 aa, synthetic construct
DQARGDFNNT

SEQ ID NO: 154969 - protein, 10 aa, synthetic construct
DQDRGDFNNT

SEQ ID NO: 154970 - protein, 10 aa, synthetic construct
DQERGDFNNT

SEQ ID NO: 154971 - protein, 10 aa, synthetic construct
DQNRGDFNNT

SEQ ID NO: 154972 - protein, 10 aa, synthetic construct
DQQRGDFNNT

SEQ ID NO: 154973 - protein, 10 aa, synthetic construct
DQSRGDFNNT

SEQ ID NO: 154974 - protein, 10 aa, synthetic construct
DQTRGDFNNT

SEQ ID NO: 154975 - protein, 10 aa, synthetic construct
DQFRGDFNNT

SEQ ID NO: 154976 - protein, 10 aa, synthetic construct
DQGRGDFNNT

SEQ ID NO: 154977 - protein, 10 aa, synthetic construct
DQHRGDFNNT

SEQ ID NO: 154978 - protein, 10 aa, synthetic construct
DQIRGDFNNT

SEQ ID NO: 154979 - protein, 10 aa, synthetic construct
DQKRGDFNNT

SEQ ID NO: 154980 - protein, 10 aa, synthetic construct
DQLRGDFNNT

SEQ ID NO: 154981 - protein, 10 aa, synthetic construct
DQMRGDFNNT

SEQ ID NO: 154982 - protein, 10 aa, synthetic construct
DQPRGDFNNT

SEQ ID NO: 154983 - protein, 10 aa, synthetic construct
DQRRGDFNNT

SEQ ID NO: 154984 - protein, 10 aa, synthetic construct
DQVRGDFNNT

SEQ ID NO: 154985 - protein, 10 aa, synthetic construct
DQWRGDFNNT

SEQ ID NO: 154986 - protein, 10 aa, synthetic construct
DQYRGDFNNT

SEQ ID NO: 154987 - protein, 10 aa, synthetic construct
DSARGDFNNT

SEQ ID NO: 154988 - protein, 10 aa, synthetic construct
DSDRGDFNNT

SEQ ID NO: 154989 - protein, 10 aa, synthetic construct
DSERGDFNNT

SEQ ID NO: 154990 - protein, 10 aa, synthetic construct
DSNRGDFNNT

SEQ ID NO: 154991 - protein, 10 aa, synthetic construct
DSQRGDFNNT

SEQ ID NO: 154992 - protein, 10 aa, synthetic construct
DSSRGDFNNT

SEQ ID NO: 154993 - protein, 10 aa, synthetic construct
DSTRGDFNNT

SEQ ID NO: 154994 - protein, 10 aa, synthetic construct
DSFRGDFNNT

SEQ ID NO: 154995 - protein, 10 aa, synthetic construct
DSGRGDFNNT

SEQ ID NO: 154996 - protein, 10 aa, synthetic construct
DSHRGDFNNT

SEQ ID NO: 154997 - protein, 10 aa, synthetic construct
DSIRGDFNNT

SEQ ID NO: 154998 - protein, 10 aa, synthetic construct
DSKRGDFNNT

SEQ ID NO: 154999 - protein, 10 aa, synthetic construct
DSLRGDFNNT

SEQ ID NO: 155000 - protein, 10 aa, synthetic construct
DSMRGDFNNT

SEQ ID NO: 155001 - protein, 10 aa, synthetic construct
DSPRGDFNNT

SEQ ID NO: 155002 - protein, 10 aa, synthetic construct
DSRRGDFNNT

SEQ ID NO: 155003 - protein, 10 aa, synthetic construct
DSVRGDFNNT

SEQ ID NO: 155004 - protein, 10 aa, synthetic construct
DSWRGDFNNT

SEQ ID NO: 155005 - protein, 10 aa, synthetic construct
DSYRGDFNNT

SEQ ID NO: 155006 - protein, 10 aa, synthetic construct
DTARGDFNNT

SEQ ID NO: 155007 - protein, 10 aa, synthetic construct
DTDRGDFNNT

SEQ ID NO: 155008 - protein, 10 aa, synthetic construct
DTERGDFNNT

SEQ ID NO: 155009 - protein, 10 aa, synthetic construct
DTNRGDFNNT

SEQ ID NO: 155010 - protein, 10 aa, synthetic construct
DTQRGDFNNT

SEQ ID NO: 155011 - protein, 10 aa, synthetic construct
DTSRGDFNNT

SEQ ID NO: 155012 - protein, 10 aa, synthetic construct
DTTRGDFNNT

SEQ ID NO: 155013 - protein, 10 aa, synthetic construct
DTFRGDFNNT

SEQ ID NO: 155014 - protein, 10 aa, synthetic construct
DTGRGDFNNT

SEQ ID NO: 155015 - protein, 10 aa, synthetic construct
DTHRGDFNNT

SEQ ID NO: 155016 - protein, 10 aa, synthetic construct
DTIRGDFNNT

SEQ ID NO: 155017 - protein, 10 aa, synthetic construct
DTKRGDFNNT

SEQ ID NO: 155018 - protein, 10 aa, synthetic construct
DTLRGDFNNT

SEQ ID NO: 155019 - protein, 10 aa, synthetic construct
DTMRGDFNNT

SEQ ID NO: 155020 - protein, 10 aa, synthetic construct
DTPRGDFNNT

SEQ ID NO: 155021 - protein, 10 aa, synthetic construct
DTRRGDFNNT

SEQ ID NO: 155022 - protein, 10 aa, synthetic construct
DTVRGDFNNT

SEQ ID NO: 155023 - protein, 10 aa, synthetic construct
DTWRGDFNNT

SEQ ID NO: 155024 - protein, 10 aa, synthetic construct
DTYRGDFNNT

SEQ ID NO: 155025 - protein, 10 aa, synthetic construct
DFARGDFNNT

SEQ ID NO: 155026 - protein, 10 aa, synthetic construct
DFDRGDFNNT

SEQ ID NO: 155027 - protein, 10 aa, synthetic construct
DFERGDFNNT

SEQ ID NO: 155028 - protein, 10 aa, synthetic construct
DFNRGDFNNT

SEQ ID NO: 155029 - protein, 10 aa, synthetic construct
DFQRGDFNNT

SEQ ID NO: 155030 - protein, 10 aa, synthetic construct
DFSRGDFNNT

SEQ ID NO: 155031 - protein, 10 aa, synthetic construct
DFTRGDFNNT

SEQ ID NO: 155032 - protein, 10 aa, synthetic construct
DFFRGDFNNT

SEQ ID NO: 155033 - protein, 10 aa, synthetic construct
DFGRGDFNNT

SEQ ID NO: 155034 - protein, 10 aa, synthetic construct
DFHRGDFNNT

SEQ ID NO: 155035 - protein, 10 aa, synthetic construct
DFIRGDFNNT

SEQ ID NO: 155036 - protein, 10 aa, synthetic construct
DFKRGDFNNT

SEQ ID NO: 155037 - protein, 10 aa, synthetic construct
DFLRGDFNNT

SEQ ID NO: 155038 - protein, 10 aa, synthetic construct
DFMRGDFNNT

SEQ ID NO: 155039 - protein, 10 aa, synthetic construct
DFPRGDFNNT

SEQ ID NO: 155040 - protein, 10 aa, synthetic construct
DFRRGDFNNT

SEQ ID NO: 155041 - protein, 10 aa, synthetic construct
DFVRGDFNNT

SEQ ID NO: 155042 - protein, 10 aa, synthetic construct
DFWRGDFNNT

SEQ ID NO: 155043 - protein, 10 aa, synthetic construct
DFYRGDFNNT

SEQ ID NO: 155044 - protein, 10 aa, synthetic construct
DGARGDFNNT

SEQ ID NO: 155045 - protein, 10 aa, synthetic construct
DGDRGDFNNT

SEQ ID NO: 155046 - protein, 10 aa, synthetic construct
DGERGDFNNT

SEQ ID NO: 155047 - protein, 10 aa, synthetic construct
DGNRGDFNNT

SEQ ID NO: 155048 - protein, 10 aa, synthetic construct
DGQRGDFNNT

SEQ ID NO: 155049 - protein, 10 aa, synthetic construct
DGSRGDFNNT

SEQ ID NO: 155050 - protein, 10 aa, synthetic construct
DGTRGDFNNT

SEQ ID NO: 155051 - protein, 10 aa, synthetic construct
DGFRGDFNNT

SEQ ID NO: 155052 - protein, 10 aa, synthetic construct
DGGRGDFNNT

SEQ ID NO: 155053 - protein, 10 aa, synthetic construct
DGHRGDFNNT

SEQ ID NO: 155054 - protein, 10 aa, synthetic construct
DGIRGDFNNT

SEQ ID NO: 155055 - protein, 10 aa, synthetic construct
DGKRGDFNNT

SEQ ID NO: 155056 - protein, 10 aa, synthetic construct
DGLRGDFNNT

SEQ ID NO: 155057 - protein, 10 aa, synthetic construct
DGMRGDFNNT

SEQ ID NO: 155058 - protein, 10 aa, synthetic construct
DGPRGDFNNT

SEQ ID NO: 155059 - protein, 10 aa, synthetic construct
DGRRGDFNNT

SEQ ID NO: 155060 - protein, 10 aa, synthetic construct
DGVRGDFNNT

SEQ ID NO: 155061 - protein, 10 aa, synthetic construct
DGWRGDFNNT

SEQ ID NO: 155062 - protein, 10 aa, synthetic construct
DGYRGDFNNT

SEQ ID NO: 155063 - protein, 10 aa, synthetic construct
DHARGDFNNT

SEQ ID NO: 155064 - protein, 10 aa, synthetic construct
DHDRGDFNNT

SEQ ID NO: 155065 - protein, 10 aa, synthetic construct
DHERGDFNNT

SEQ ID NO: 155066 - protein, 10 aa, synthetic construct
DHNRGDFNNT

SEQ ID NO: 155067 - protein, 10 aa, synthetic construct
DHQRGDFNNT

SEQ ID NO: 155068 - protein, 10 aa, synthetic construct
DHSRGDFNNT

SEQ ID NO: 155069 - protein, 10 aa, synthetic construct
DHTRGDFNNT

SEQ ID NO: 155070 - protein, 10 aa, synthetic construct
DHFRGDFNNT

SEQ ID NO: 155071 - protein, 10 aa, synthetic construct
DHGRGDFNNT

SEQ ID NO: 155072 - protein, 10 aa, synthetic construct
DHHRGDFNNT

SEQ ID NO: 155073 - protein, 10 aa, synthetic construct
DHIRGDFNNT

SEQ ID NO: 155074 - protein, 10 aa, synthetic construct
DHKRGDFNNT

SEQ ID NO: 155075 - protein, 10 aa, synthetic construct
DHLRGDFNNT

SEQ ID NO: 155076 - protein, 10 aa, synthetic construct
DHMRGDFNNT

SEQ ID NO: 155077 - protein, 10 aa, synthetic construct
DHPRGDFNNT

SEQ ID NO: 155078 - protein, 10 aa, synthetic construct
DHRRGDFNNT

SEQ ID NO: 155079 - protein, 10 aa, synthetic construct
DHVRGDFNNT

SEQ ID NO: 155080 - protein, 10 aa, synthetic construct
DHWRGDFNNT

SEQ ID NO: 155081 - protein, 10 aa, synthetic construct
DHYRGDFNNT

SEQ ID NO: 155082 - protein, 10 aa, synthetic construct
DIARGDFNNT

SEQ ID NO: 155083 - protein, 10 aa, synthetic construct
DIDRGDFNNT

SEQ ID NO: 155084 - protein, 10 aa, synthetic construct
DIERGDFNNT

SEQ ID NO: 155085 - protein, 10 aa, synthetic construct
DINRGDFNNT

SEQ ID NO: 155086 - protein, 10 aa, synthetic construct
DIQRGDFNNT

SEQ ID NO: 155087 - protein, 10 aa, synthetic construct
DISRGDFNNT

SEQ ID NO: 155088 - protein, 10 aa, synthetic construct
DITRGDFNNT

SEQ ID NO: 155089 - protein, 10 aa, synthetic construct
DIFRGDFNNT

SEQ ID NO: 155090 - protein, 10 aa, synthetic construct
DIGRGDFNNT

SEQ ID NO: 155091 - protein, 10 aa, synthetic construct
DIHRGDFNNT

SEQ ID NO: 155092 - protein, 10 aa, synthetic construct
DIIRGDFNNT

SEQ ID NO: 155093 - protein, 10 aa, synthetic construct
DIKRGDFNNT

SEQ ID NO: 155094 - protein, 10 aa, synthetic construct
DILRGDFNNT

SEQ ID NO: 155095 - protein, 10 aa, synthetic construct
DIMRGDFNNT

SEQ ID NO: 155096 - protein, 10 aa, synthetic construct
DIPRGDFNNT

SEQ ID NO: 155097 - protein, 10 aa, synthetic construct
DIRRGDFNNT

SEQ ID NO: 155098 - protein, 10 aa, synthetic construct
DIVRGDFNNT

SEQ ID NO: 155099 - protein, 10 aa, synthetic construct
DIWRGDFNNT

SEQ ID NO: 155100 - protein, 10 aa, synthetic construct
DIYRGDFNNT

SEQ ID NO: 155101 - protein, 10 aa, synthetic construct
DKARGDFNNT

SEQ ID NO: 155102 - protein, 10 aa, synthetic construct
DKDRGDFNNT

SEQ ID NO: 155103 - protein, 10 aa, synthetic construct
DKERGDFNNT

SEQ ID NO: 155104 - protein, 10 aa, synthetic construct
DKNRGDFNNT

SEQ ID NO: 155105 - protein, 10 aa, synthetic construct
DKQRGDFNNT

SEQ ID NO: 155106 - protein, 10 aa, synthetic construct
DKSRGDFNNT

SEQ ID NO: 155107 - protein, 10 aa, synthetic construct
DKTRGDFNNT

SEQ ID NO: 155108 - protein, 10 aa, synthetic construct
DKFRGDFNNT

SEQ ID NO: 155109 - protein, 10 aa, synthetic construct
DKGRGDFNNT

SEQ ID NO: 155110 - protein, 10 aa, synthetic construct
DKHRGDFNNT

SEQ ID NO: 155111 - protein, 10 aa, synthetic construct
DKIRGDFNNT

SEQ ID NO: 155112 - protein, 10 aa, synthetic construct
DKKRGDFNNT

SEQ ID NO: 155113 - protein, 10 aa, synthetic construct
DKLRGDFNNT

SEQ ID NO: 155114 - protein, 10 aa, synthetic construct
DKMRGDFNNT

SEQ ID NO: 155115 - protein, 10 aa, synthetic construct
DKPRGDFNNT

SEQ ID NO: 155116 - protein, 10 aa, synthetic construct
DKRRGDFNNT

SEQ ID NO: 155117 - protein, 10 aa, synthetic construct
DKVRGDFNNT

SEQ ID NO: 155118 - protein, 10 aa, synthetic construct
DKWRGDFNNT

SEQ ID NO: 155119 - protein, 10 aa, synthetic construct
DKYRGDFNNT

SEQ ID NO: 155120 - protein, 10 aa, synthetic construct
DLARGDFNNT

SEQ ID NO: 155121 - protein, 10 aa, synthetic construct
DLDRGDFNNT

SEQ ID NO: 155122 - protein, 10 aa, synthetic construct
DLERGDFNNT

SEQ ID NO: 155123 - protein, 10 aa, synthetic construct
DLNRGDFNNT

SEQ ID NO: 155124 - protein, 10 aa, synthetic construct
DLQRGDFNNT

SEQ ID NO: 155125 - protein, 10 aa, synthetic construct
DLSRGDFNNT

SEQ ID NO: 155126 - protein, 10 aa, synthetic construct
DLTRGDFNNT

SEQ ID NO: 155127 - protein, 10 aa, synthetic construct
DLFRGDFNNT

SEQ ID NO: 155128 - protein, 10 aa, synthetic construct
DLGRGDFNNT

SEQ ID NO: 155129 - protein, 10 aa, synthetic construct
DLHRGDFNNT

SEQ ID NO: 155130 - protein, 10 aa, synthetic construct
DLIRGDFNNT

SEQ ID NO: 155131 - protein, 10 aa, synthetic construct
DLKRGDFNNT

SEQ ID NO: 155132 - protein, 10 aa, synthetic construct
DLLRGDFNNT

SEQ ID NO: 155133 - protein, 10 aa, synthetic construct
DLMRGDFNNT

SEQ ID NO: 155134 - protein, 10 aa, synthetic construct
DLPRGDFNNT

SEQ ID NO: 155135 - protein, 10 aa, synthetic construct
DLRRGDFNNT

SEQ ID NO: 155136 - protein, 10 aa, synthetic construct
DLVRGDFNNT

SEQ ID NO: 155137 - protein, 10 aa, synthetic construct
DLWRGDFNNT

SEQ ID NO: 155138 - protein, 10 aa, synthetic construct
DLYRGDFNNT

SEQ ID NO: 155139 - protein, 10 aa, synthetic construct
DMARGDFNNT

SEQ ID NO: 155140 - protein, 10 aa, synthetic construct
DMDRGDFNNT

SEQ ID NO: 155141 - protein, 10 aa, synthetic construct
DMERGDFNNT

SEQ ID NO: 155142 - protein, 10 aa, synthetic construct
DMNRGDFNNT

SEQ ID NO: 155143 - protein, 10 aa, synthetic construct
DMQRGDFNNT

SEQ ID NO: 155144 - protein, 10 aa, synthetic construct
DMSRGDFNNT

SEQ ID NO: 155145 - protein, 10 aa, synthetic construct
DMTRGDFNNT

SEQ ID NO: 155146 - protein, 10 aa, synthetic construct
DMFRGDFNNT

SEQ ID NO: 155147 - protein, 10 aa, synthetic construct
DMGRGDFNNT

SEQ ID NO: 155148 - protein, 10 aa, synthetic construct
DMHRGDFNNT

SEQ ID NO: 155149 - protein, 10 aa, synthetic construct
DMIRGDFNNT

SEQ ID NO: 155150 - protein, 10 aa, synthetic construct
DMKRGDFNNT

SEQ ID NO: 155151 - protein, 10 aa, synthetic construct
DMLRGDFNNT

SEQ ID NO: 155152 - protein, 10 aa, synthetic construct
DMMRGDFNNT

SEQ ID NO: 155153 - protein, 10 aa, synthetic construct
DMPRGDFNNT

SEQ ID NO: 155154 - protein, 10 aa, synthetic construct
DMRRGDFNNT

SEQ ID NO: 155155 - protein, 10 aa, synthetic construct
DMVRGDFNNT

SEQ ID NO: 155156 - protein, 10 aa, synthetic construct
DMWRGDFNNT

SEQ ID NO: 155157 - protein, 10 aa, synthetic construct
DMYRGDFNNT

SEQ ID NO: 155158 - protein, 10 aa, synthetic construct
DPARGDFNNT

SEQ ID NO: 155159 - protein, 10 aa, synthetic construct
DPDRGDFNNT

SEQ ID NO: 155160 - protein, 10 aa, synthetic construct
DPERGDFNNT

SEQ ID NO: 155161 - protein, 10 aa, synthetic construct
DPNRGDFNNT

SEQ ID NO: 155162 - protein, 10 aa, synthetic construct
DPQRGDFNNT

SEQ ID NO: 155163 - protein, 10 aa, synthetic construct
DPSRGDFNNT

SEQ ID NO: 155164 - protein, 10 aa, synthetic construct
DPTRGDFNNT

SEQ ID NO: 155165 - protein, 10 aa, synthetic construct
DPFRGDFNNT

SEQ ID NO: 155166 - protein, 10 aa, synthetic construct
DPGRGDFNNT

SEQ ID NO: 155167 - protein, 10 aa, synthetic construct
DPHRGDFNNT

SEQ ID NO: 155168 - protein, 10 aa, synthetic construct
DPIRGDFNNT

SEQ ID NO: 155169 - protein, 10 aa, synthetic construct
DPKRGDFNNT

SEQ ID NO: 155170 - protein, 10 aa, synthetic construct
DPLRGDFNNT

SEQ ID NO: 155171 - protein, 10 aa, synthetic construct
DPMRGDFNNT

SEQ ID NO: 155172 - protein, 10 aa, synthetic construct
DPPRGDFNNT

SEQ ID NO: 155173 - protein, 10 aa, synthetic construct
DPRRGDFNNT

SEQ ID NO: 155174 - protein, 10 aa, synthetic construct
DPVRGDFNNT

SEQ ID NO: 155175 - protein, 10 aa, synthetic construct
DPWRGDFNNT

SEQ ID NO: 155176 - protein, 10 aa, synthetic construct
DPYRGDFNNT

SEQ ID NO: 155177 - protein, 10 aa, synthetic construct
DRARGDFNNT

SEQ ID NO: 155178 - protein, 10 aa, synthetic construct
DRDRGDFNNT

SEQ ID NO: 155179 - protein, 10 aa, synthetic construct
DRERGDFNNT

SEQ ID NO: 155180 - protein, 10 aa, synthetic construct
DRNRGDFNNT

SEQ ID NO: 155181 - protein, 10 aa, synthetic construct
DRQRGDFNNT

SEQ ID NO: 155182 - protein, 10 aa, synthetic construct
DRSRGDFNNT

SEQ ID NO: 155183 - protein, 10 aa, synthetic construct
DRTRGDFNNT

SEQ ID NO: 155184 - protein, 10 aa, synthetic construct
DRFRGDFNNT

SEQ ID NO: 155185 - protein, 10 aa, synthetic construct
DRGRGDFNNT

SEQ ID NO: 155186 - protein, 10 aa, synthetic construct
DRHRGDFNNT

SEQ ID NO: 155187 - protein, 10 aa, synthetic construct
DRIRGDFNNT

SEQ ID NO: 155188 - protein, 10 aa, synthetic construct
DRKRGDFNNT

SEQ ID NO: 155189 - protein, 10 aa, synthetic construct
DRLRGDFNNT

SEQ ID NO: 155190 - protein, 10 aa, synthetic construct
DRMRGDFNNT

SEQ ID NO: 155191 - protein, 10 aa, synthetic construct
DRPRGDFNNT

SEQ ID NO: 155192 - protein, 10 aa, synthetic construct
DRRRGDFNNT

SEQ ID NO: 155193 - protein, 10 aa, synthetic construct
DRVRGDFNNT

SEQ ID NO: 155194 - protein, 10 aa, synthetic construct
DRWRGDFNNT

SEQ ID NO: 155195 - protein, 10 aa, synthetic construct
DRYRGDFNNT

SEQ ID NO: 155196 - protein, 10 aa, synthetic construct
DVARGDFNNT

SEQ ID NO: 155197 - protein, 10 aa, synthetic construct
DVDRGDFNNT

SEQ ID NO: 155198 - protein, 10 aa, synthetic construct
DVERGDFNNT

SEQ ID NO: 155199 - protein, 10 aa, synthetic construct
DVNRGDFNNT

SEQ ID NO: 155200 - protein, 10 aa, synthetic construct
DVQRGDFNNT

SEQ ID NO: 155201 - protein, 10 aa, synthetic construct
DVSRGDFNNT

SEQ ID NO: 155202 - protein, 10 aa, synthetic construct
DVTRGDFNNT

SEQ ID NO: 155203 - protein, 10 aa, synthetic construct
DVFRGDFNNT

SEQ ID NO: 155204 - protein, 10 aa, synthetic construct
DVGRGDFNNT

SEQ ID NO: 155205 - protein, 10 aa, synthetic construct
DVHRGDFNNT

SEQ ID NO: 155206 - protein, 10 aa, synthetic construct
DVIRGDFNNT

SEQ ID NO: 155207 - protein, 10 aa, synthetic construct
DVKRGDFNNT

SEQ ID NO: 155208 - protein, 10 aa, synthetic construct
DVLRGDFNNT

SEQ ID NO: 155209 - protein, 10 aa, synthetic construct
DVMRGDFNNT

SEQ ID NO: 155210 - protein, 10 aa, synthetic construct
DVPRGDFNNT

SEQ ID NO: 155211 - protein, 10 aa, synthetic construct
DVRRGDFNNT

SEQ ID NO: 155212 - protein, 10 aa, synthetic construct
DVVRGDFNNT

SEQ ID NO: 155213 - protein, 10 aa, synthetic construct
DVWRGDFNNT

SEQ ID NO: 155214 - protein, 10 aa, synthetic construct
DVYRGDFNNT

SEQ ID NO: 155215 - protein, 10 aa, synthetic construct
DWARGDFNNT

SEQ ID NO: 155216 - protein, 10 aa, synthetic construct
DWDRGDFNNT

SEQ ID NO: 155217 - protein, 10 aa, synthetic construct
DWERGDFNNT

SEQ ID NO: 155218 - protein, 10 aa, synthetic construct
DWNRGDFNNT

SEQ ID NO: 155219 - protein, 10 aa, synthetic construct
DWQRGDFNNT

SEQ ID NO: 155220 - protein, 10 aa, synthetic construct
DWSRGDFNNT

SEQ ID NO: 155221 - protein, 10 aa, synthetic construct
DWTRGDFNNT

SEQ ID NO: 155222 - protein, 10 aa, synthetic construct
DWFRGDFNNT

SEQ ID NO: 155223 - protein, 10 aa, synthetic construct
DWGRGDFNNT

SEQ ID NO: 155224 - protein, 10 aa, synthetic construct
DWHRGDFNNT

SEQ ID NO: 155225 - protein, 10 aa, synthetic construct
DWIRGDFNNT

SEQ ID NO: 155226 - protein, 10 aa, synthetic construct
DWKRGDFNNT

SEQ ID NO: 155227 - protein, 10 aa, synthetic construct
DWLRGDFNNT

SEQ ID NO: 155228 - protein, 10 aa, synthetic construct
DWMRGDFNNT

SEQ ID NO: 155229 - protein, 10 aa, synthetic construct
DWPRGDFNNT

SEQ ID NO: 155230 - protein, 10 aa, synthetic construct
DWRRGDFNNT

SEQ ID NO: 155231 - protein, 10 aa, synthetic construct
DWVRGDFNNT

SEQ ID NO: 155232 - protein, 10 aa, synthetic construct
DWWRGDFNNT

SEQ ID NO: 155233 - protein, 10 aa, synthetic construct
DWYRGDFNNT

SEQ ID NO: 155234 - protein, 10 aa, synthetic construct
DYARGDFNNT

SEQ ID NO: 155235 - protein, 10 aa, synthetic construct
DYDRGDFNNT

SEQ ID NO: 155236 - protein, 10 aa, synthetic construct
DYERGDFNNT

SEQ ID NO: 155237 - protein, 10 aa, synthetic construct
DYNRGDFNNT

SEQ ID NO: 155238 - protein, 10 aa, synthetic construct
DYQRGDFNNT

SEQ ID NO: 155239 - protein, 10 aa, synthetic construct
DYSRGDFNNT

SEQ ID NO: 155240 - protein, 10 aa, synthetic construct
DYTRGDFNNT

SEQ ID NO: 155241 - protein, 10 aa, synthetic construct
DYFRGDFNNT

SEQ ID NO: 155242 - protein, 10 aa, synthetic construct
DYGRGDFNNT

SEQ ID NO: 155243 - protein, 10 aa, synthetic construct
DYHRGDFNNT

SEQ ID NO: 155244 - protein, 10 aa, synthetic construct
DYIRGDFNNT

SEQ ID NO: 155245 - protein, 10 aa, synthetic construct
DYKRGDFNNT

SEQ ID NO: 155246 - protein, 10 aa, synthetic construct
DYLRGDFNNT

SEQ ID NO: 155247 - protein, 10 aa, synthetic construct
DYMRGDFNNT

SEQ ID NO: 155248 - protein, 10 aa, synthetic construct
DYPRGDFNNT

SEQ ID NO: 155249 - protein, 10 aa, synthetic construct
DYRRGDFNNT

SEQ ID NO: 155250 - protein, 10 aa, synthetic construct
DYVRGDFNNT

SEQ ID NO: 155251 - protein, 10 aa, synthetic construct
DYWRGDFNNT

SEQ ID NO: 155252 - protein, 10 aa, synthetic construct
DYYRGDFNNT

SEQ ID NO: 155253 - protein, 10 aa, synthetic construct
EAARGDFNNT

SEQ ID NO: 155254 - protein, 10 aa, synthetic construct
EADRGDFNNT

SEQ ID NO: 155255 - protein, 10 aa, synthetic construct
EAERGDFNNT

SEQ ID NO: 155256 - protein, 10 aa, synthetic construct
EANRGDFNNT

SEQ ID NO: 155257 - protein, 10 aa, synthetic construct
EAQRGDFNNT

SEQ ID NO: 155258 - protein, 10 aa, synthetic construct
EASRGDFNNT

SEQ ID NO: 155259 - protein, 10 aa, synthetic construct
EATRGDFNNT

SEQ ID NO: 155260 - protein, 10 aa, synthetic construct
EAFRGDFNNT

SEQ ID NO: 155261 - protein, 10 aa, synthetic construct
EAGRGDFNNT

SEQ ID NO: 155262 - protein, 10 aa, synthetic construct
EAHRGDFNNT

SEQ ID NO: 155263 - protein, 10 aa, synthetic construct
EAIRGDFNNT

SEQ ID NO: 155264 - protein, 10 aa, synthetic construct
EAKRGDFNNT

SEQ ID NO: 155265 - protein, 10 aa, synthetic construct
EALRGDFNNT

SEQ ID NO: 155266 - protein, 10 aa, synthetic construct
EAMRGDFNNT

SEQ ID NO: 155267 - protein, 10 aa, synthetic construct
EAPRGDFNNT

SEQ ID NO: 155268 - protein, 10 aa, synthetic construct
EARRGDFNNT

SEQ ID NO: 155269 - protein, 10 aa, synthetic construct
EAVRGDFNNT

SEQ ID NO: 155270 - protein, 10 aa, synthetic construct
EAWRGDFNNT

SEQ ID NO: 155271 - protein, 10 aa, synthetic construct
EAYRGDFNNT

SEQ ID NO: 155272 - protein, 10 aa, synthetic construct
EDARGDFNNT

SEQ ID NO: 155273 - protein, 10 aa, synthetic construct
EDDRGDFNNT

SEQ ID NO: 155274 - protein, 10 aa, synthetic construct
EDERGDFNNT

SEQ ID NO: 155275 - protein, 10 aa, synthetic construct
EDNRGDFNNT

SEQ ID NO: 155276 - protein, 10 aa, synthetic construct
EDQRGDFNNT

SEQ ID NO: 155277 - protein, 10 aa, synthetic construct
EDSRGDFNNT

SEQ ID NO: 155278 - protein, 10 aa, synthetic construct
EDTRGDFNNT

SEQ ID NO: 155279 - protein, 10 aa, synthetic construct
EDFRGDFNNT

SEQ ID NO: 155280 - protein, 10 aa, synthetic construct
EDGRGDFNNT

SEQ ID NO: 155281 - protein, 10 aa, synthetic construct
EDHRGDFNNT

SEQ ID NO: 155282 - protein, 10 aa, synthetic construct
EDIRGDFNNT

SEQ ID NO: 155283 - protein, 10 aa, synthetic construct
EDKRGDFNNT

SEQ ID NO: 155284 - protein, 10 aa, synthetic construct
EDLRGDFNNT

SEQ ID NO: 155285 - protein, 10 aa, synthetic construct
EDMRGDFNNT

SEQ ID NO: 155286 - protein, 10 aa, synthetic construct
EDPRGDFNNT

SEQ ID NO: 155287 - protein, 10 aa, synthetic construct
EDRRGDFNNT

SEQ ID NO: 155288 - protein, 10 aa, synthetic construct
EDVRGDFNNT

SEQ ID NO: 155289 - protein, 10 aa, synthetic construct
EDWRGDFNNT

SEQ ID NO: 155290 - protein, 10 aa, synthetic construct
EDYRGDFNNT

SEQ ID NO: 155291 - protein, 10 aa, synthetic construct
EEARGDFNNT

SEQ ID NO: 155292 - protein, 10 aa, synthetic construct
EEDRGDFNNT

SEQ ID NO: 155293 - protein, 10 aa, synthetic construct
EEERGDFNNT

SEQ ID NO: 155294 - protein, 10 aa, synthetic construct
EENRGDFNNT

SEQ ID NO: 155295 - protein, 10 aa, synthetic construct
EEQRGDFNNT

SEQ ID NO: 155296 - protein, 10 aa, synthetic construct
EESRGDFNNT

SEQ ID NO: 155297 - protein, 10 aa, synthetic construct
EETRGDFNNT

SEQ ID NO: 155298 - protein, 10 aa, synthetic construct
EEFRGDFNNT

SEQ ID NO: 155299 - protein, 10 aa, synthetic construct
EEGRGDFNNT

SEQ ID NO: 155300 - protein, 10 aa, synthetic construct
EEHRGDFNNT

SEQ ID NO: 155301 - protein, 10 aa, synthetic construct
EEIRGDFNNT

SEQ ID NO: 155302 - protein, 10 aa, synthetic construct
EEKRGDFNNT

SEQ ID NO: 155303 - protein, 10 aa, synthetic construct
EELRGDFNNT

SEQ ID NO: 155304 - protein, 10 aa, synthetic construct
EEMRGDFNNT

SEQ ID NO: 155305 - protein, 10 aa, synthetic construct
EEPRGDFNNT

SEQ ID NO: 155306 - protein, 10 aa, synthetic construct
EERRGDFNNT

SEQ ID NO: 155307 - protein, 10 aa, synthetic construct
EEVRGDFNNT

SEQ ID NO: 155308 - protein, 10 aa, synthetic construct
EEWRGDFNNT

SEQ ID NO: 155309 - protein, 10 aa, synthetic construct
EEYRGDFNNT

SEQ ID NO: 155310 - protein, 10 aa, synthetic construct
ENARGDFNNT

SEQ ID NO: 155311 - protein, 10 aa, synthetic construct
ENDRGDFNNT

SEQ ID NO: 155312 - protein, 10 aa, synthetic construct
ENERGDFNNT

SEQ ID NO: 155313 - protein, 10 aa, synthetic construct
ENNRGDFNNT

SEQ ID NO: 155314 - protein, 10 aa, synthetic construct
ENQRGDFNNT

SEQ ID NO: 155315 - protein, 10 aa, synthetic construct
ENSRGDFNNT

SEQ ID NO: 155316 - protein, 10 aa, synthetic construct
ENTRGDFNNT

SEQ ID NO: 155317 - protein, 10 aa, synthetic construct
ENFRGDFNNT

SEQ ID NO: 155318 - protein, 10 aa, synthetic construct
ENGRGDFNNT

SEQ ID NO: 155319 - protein, 10 aa, synthetic construct
ENHRGDFNNT

SEQ ID NO: 155320 - protein, 10 aa, synthetic construct
ENIRGDFNNT

SEQ ID NO: 155321 - protein, 10 aa, synthetic construct
ENKRGDFNNT

SEQ ID NO: 155322 - protein, 10 aa, synthetic construct
ENLRGDFNNT

SEQ ID NO: 155323 - protein, 10 aa, synthetic construct
ENMRGDFNNT

SEQ ID NO: 155324 - protein, 10 aa, synthetic construct
ENPRGDFNNT

SEQ ID NO: 155325 - protein, 10 aa, synthetic construct
ENVRGDFNNT

SEQ ID NO: 155326 - protein, 10 aa, synthetic construct
ENWRGDFNNT

SEQ ID NO: 155327 - protein, 10 aa, synthetic construct
ENYRGDFNNT

SEQ ID NO: 155328 - protein, 10 aa, synthetic construct
EQARGDFNNT

SEQ ID NO: 155329 - protein, 10 aa, synthetic construct
EQDRGDFNNT

SEQ ID NO: 155330 - protein, 10 aa, synthetic construct
EQERGDFNNT

SEQ ID NO: 155331 - protein, 10 aa, synthetic construct
EQNRGDFNNT

SEQ ID NO: 155332 - protein, 10 aa, synthetic construct
EQQRGDFNNT

SEQ ID NO: 155333 - protein, 10 aa, synthetic construct
EQSRGDFNNT

SEQ ID NO: 155334 - protein, 10 aa, synthetic construct
EQTRGDFNNT

SEQ ID NO: 155335 - protein, 10 aa, synthetic construct
EQFRGDFNNT

SEQ ID NO: 155336 - protein, 10 aa, synthetic construct
EQGRGDFNNT

SEQ ID NO: 155337 - protein, 10 aa, synthetic construct
EQHRGDFNNT

SEQ ID NO: 155338 - protein, 10 aa, synthetic construct
EQIRGDFNNT

SEQ ID NO: 155339 - protein, 10 aa, synthetic construct
EQKRGDFNNT

SEQ ID NO: 155340 - protein, 10 aa, synthetic construct
EQLRGDFNNT

SEQ ID NO: 155341 - protein, 10 aa, synthetic construct
EQMRGDFNNT

SEQ ID NO: 155342 - protein, 10 aa, synthetic construct
EQPRGDFNNT

SEQ ID NO: 155343 - protein, 10 aa, synthetic construct
EQRRGDFNNT

SEQ ID NO: 155344 - protein, 10 aa, synthetic construct
EQVRGDFNNT

SEQ ID NO: 155345 - protein, 10 aa, synthetic construct
EQWRGDFNNT

SEQ ID NO: 155346 - protein, 10 aa, synthetic construct
EQYRGDFNNT

SEQ ID NO: 155347 - protein, 10 aa, synthetic construct
ESARGDFNNT

SEQ ID NO: 155348 - protein, 10 aa, synthetic construct
ESDRGDFNNT

SEQ ID NO: 155349 - protein, 10 aa, synthetic construct
ESERGDFNNT

SEQ ID NO: 155350 - protein, 10 aa, synthetic construct
ESNRGDFNNT

SEQ ID NO: 155351 - protein, 10 aa, synthetic construct
ESQRGDFNNT

SEQ ID NO: 155352 - protein, 10 aa, synthetic construct
ESSRGDFNNT

SEQ ID NO: 155353 - protein, 10 aa, synthetic construct
ESTRGDFNNT

SEQ ID NO: 155354 - protein, 10 aa, synthetic construct
ESFRGDFNNT

SEQ ID NO: 155355 - protein, 10 aa, synthetic construct
ESGRGDFNNT

SEQ ID NO: 155356 - protein, 10 aa, synthetic construct
ESHRGDFNNT

SEQ ID NO: 155357 - protein, 10 aa, synthetic construct
ESIRGDFNNT

SEQ ID NO: 155358 - protein, 10 aa, synthetic construct
ESKRGDFNNT

SEQ ID NO: 155359 - protein, 10 aa, synthetic construct
ESLRGDFNNT

SEQ ID NO: 155360 - protein, 10 aa, synthetic construct
ESMRGDFNNT

SEQ ID NO: 155361 - protein, 10 aa, synthetic construct
ESPRGDFNNT

SEQ ID NO: 155362 - protein, 10 aa, synthetic construct
ESRRGDFNNT

SEQ ID NO: 155363 - protein, 10 aa, synthetic construct
ESVRGDFNNT

SEQ ID NO: 155364 - protein, 10 aa, synthetic construct
ESWRGDFNNT

SEQ ID NO: 155365 - protein, 10 aa, synthetic construct
ESYRGDFNNT

SEQ ID NO: 155366 - protein, 10 aa, synthetic construct
ETARGDFNNT

SEQ ID NO: 155367 - protein, 10 aa, synthetic construct
ETDRGDFNNT

SEQ ID NO: 155368 - protein, 10 aa, synthetic construct
ETERGDFNNT

SEQ ID NO: 155369 - protein, 10 aa, synthetic construct
ETNRGDFNNT

SEQ ID NO: 155370 - protein, 10 aa, synthetic construct
ETQRGDFNNT

SEQ ID NO: 155371 - protein, 10 aa, synthetic construct
ETSRGDFNNT

SEQ ID NO: 155372 - protein, 10 aa, synthetic construct
ETTRGDFNNT

SEQ ID NO: 155373 - protein, 10 aa, synthetic construct
ETFRGDFNNT

SEQ ID NO: 155374 - protein, 10 aa, synthetic construct
ETGRGDFNNT

SEQ ID NO: 155375 - protein, 10 aa, synthetic construct
ETHRGDFNNT

SEQ ID NO: 155376 - protein, 10 aa, synthetic construct
ETIRGDFNNT

SEQ ID NO: 155377 - protein, 10 aa, synthetic construct
ETKRGDFNNT

SEQ ID NO: 155378 - protein, 10 aa, synthetic construct
ETLRGDFNNT

SEQ ID NO: 155379 - protein, 10 aa, synthetic construct
ETMRGDFNNT

SEQ ID NO: 155380 - protein, 10 aa, synthetic construct
ETPRGDFNNT

SEQ ID NO: 155381 - protein, 10 aa, synthetic construct
ETRRGDFNNT

SEQ ID NO: 155382 - protein, 10 aa, synthetic construct
ETVRGDFNNT

SEQ ID NO: 155383 - protein, 10 aa, synthetic construct
ETWRGDFNNT

SEQ ID NO: 155384 - protein, 10 aa, synthetic construct
ETYRGDFNNT

SEQ ID NO: 155385 - protein, 10 aa, synthetic construct
EFARGDFNNT

SEQ ID NO: 155386 - protein, 10 aa, synthetic construct
EFDRGDFNNT

SEQ ID NO: 155387 - protein, 10 aa, synthetic construct
EFERGDFNNT

SEQ ID NO: 155388 - protein, 10 aa, synthetic construct
EFNRGDFNNT

SEQ ID NO: 155389 - protein, 10 aa, synthetic construct
EFQRGDFNNT

SEQ ID NO: 155390 - protein, 10 aa, synthetic construct
EFSRGDFNNT

SEQ ID NO: 155391 - protein, 10 aa, synthetic construct
EFTRGDFNNT

SEQ ID NO: 155392 - protein, 10 aa, synthetic construct
EFFRGDFNNT

SEQ ID NO: 155393 - protein, 10 aa, synthetic construct
EFGRGDFNNT

SEQ ID NO: 155394 - protein, 10 aa, synthetic construct
EFHRGDFNNT

SEQ ID NO: 155395 - protein, 10 aa, synthetic construct
EFIRGDFNNT

SEQ ID NO: 155396 - protein, 10 aa, synthetic construct
EFKRGDFNNT

SEQ ID NO: 155397 - protein, 10 aa, synthetic construct
EFLRGDFNNT

SEQ ID NO: 155398 - protein, 10 aa, synthetic construct
EFMRGDFNNT

SEQ ID NO: 155399 - protein, 10 aa, synthetic construct
EFPRGDFNNT

SEQ ID NO: 155400 - protein, 10 aa, synthetic construct
EFRRGDFNNT

SEQ ID NO: 155401 - protein, 10 aa, synthetic construct
EFVRGDFNNT

SEQ ID NO: 155402 - protein, 10 aa, synthetic construct
EFWRGDFNNT

SEQ ID NO: 155403 - protein, 10 aa, synthetic construct
EFYRGDFNNT

SEQ ID NO: 155404 - protein, 10 aa, synthetic construct
EGARGDFNNT

SEQ ID NO: 155405 - protein, 10 aa, synthetic construct
EGDRGDFNNT

SEQ ID NO: 155406 - protein, 10 aa, synthetic construct
EGERGDFNNT

SEQ ID NO: 155407 - protein, 10 aa, synthetic construct
EGNRGDFNNT

SEQ ID NO: 155408 - protein, 10 aa, synthetic construct
EGQRGDFNNT

SEQ ID NO: 155409 - protein, 10 aa, synthetic construct
EGSRGDFNNT

SEQ ID NO: 155410 - protein, 10 aa, synthetic construct
EGTRGDFNNT

SEQ ID NO: 155411 - protein, 10 aa, synthetic construct
EGFRGDFNNT

SEQ ID NO: 155412 - protein, 10 aa, synthetic construct
EGGRGDFNNT

SEQ ID NO: 155413 - protein, 10 aa, synthetic construct
EGHRGDFNNT

SEQ ID NO: 155414 - protein, 10 aa, synthetic construct
EGIRGDFNNT

SEQ ID NO: 155415 - protein, 10 aa, synthetic construct
EGKRGDFNNT

SEQ ID NO: 155416 - protein, 10 aa, synthetic construct
EGLRGDFNNT

SEQ ID NO: 155417 - protein, 10 aa, synthetic construct
EGMRGDFNNT

SEQ ID NO: 155418 - protein, 10 aa, synthetic construct
EGPRGDFNNT

SEQ ID NO: 155419 - protein, 10 aa, synthetic construct
EGRRGDFNNT

SEQ ID NO: 155420 - protein, 10 aa, synthetic construct
EGVRGDFNNT

SEQ ID NO: 155421 - protein, 10 aa, synthetic construct
EGWRGDFNNT

SEQ ID NO: 155422 - protein, 10 aa, synthetic construct
EGYRGDFNNT

SEQ ID NO: 155423 - protein, 10 aa, synthetic construct
EHARGDFNNT

SEQ ID NO: 155424 - protein, 10 aa, synthetic construct
EHDRGDFNNT

SEQ ID NO: 155425 - protein, 10 aa, synthetic construct
EHERGDFNNT

SEQ ID NO: 155426 - protein, 10 aa, synthetic construct
EHNRGDFNNT

SEQ ID NO: 155427 - protein, 10 aa, synthetic construct
EHQRGDFNNT

SEQ ID NO: 155428 - protein, 10 aa, synthetic construct
EHSRGDFNNT

SEQ ID NO: 155429 - protein, 10 aa, synthetic construct
EHTRGDFNNT

SEQ ID NO: 155430 - protein, 10 aa, synthetic construct
EHFRGDFNNT

SEQ ID NO: 155431 - protein, 10 aa, synthetic construct
EHGRGDFNNT

SEQ ID NO: 155432 - protein, 10 aa, synthetic construct
EHHRGDFNNT

SEQ ID NO: 155433 - protein, 10 aa, synthetic construct
EHIRGDFNNT

SEQ ID NO: 155434 - protein, 10 aa, synthetic construct
EHKRGDFNNT

SEQ ID NO: 155435 - protein, 10 aa, synthetic construct
EHLRGDFNNT

SEQ ID NO: 155436 - protein, 10 aa, synthetic construct
EHMRGDFNNT

SEQ ID NO: 155437 - protein, 10 aa, synthetic construct
EHPRGDFNNT

SEQ ID NO: 155438 - protein, 10 aa, synthetic construct
EHRRGDFNNT

SEQ ID NO: 155439 - protein, 10 aa, synthetic construct
EHVRGDFNNT

SEQ ID NO: 155440 - protein, 10 aa, synthetic construct
EHWRGDFNNT

SEQ ID NO: 155441 - protein, 10 aa, synthetic construct
EHYRGDFNNT

SEQ ID NO: 155442 - protein, 10 aa, synthetic construct
EIARGDFNNT

SEQ ID NO: 155443 - protein, 10 aa, synthetic construct
EIDRGDFNNT

SEQ ID NO: 155444 - protein, 10 aa, synthetic construct
EIERGDFNNT

SEQ ID NO: 155445 - protein, 10 aa, synthetic construct
EINRGDFNNT

SEQ ID NO: 155446 - protein, 10 aa, synthetic construct
EIQRGDFNNT

SEQ ID NO: 155447 - protein, 10 aa, synthetic construct
EISRGDFNNT

SEQ ID NO: 155448 - protein, 10 aa, synthetic construct
EITRGDFNNT

SEQ ID NO: 155449 - protein, 10 aa, synthetic construct
EIFRGDFNNT

SEQ ID NO: 155450 - protein, 10 aa, synthetic construct
EIGRGDFNNT

SEQ ID NO: 155451 - protein, 10 aa, synthetic construct
EIHRGDFNNT

SEQ ID NO: 155452 - protein, 10 aa, synthetic construct
EIIRGDFNNT

SEQ ID NO: 155453 - protein, 10 aa, synthetic construct
EIKRGDFNNT

SEQ ID NO: 155454 - protein, 10 aa, synthetic construct
EILRGDFNNT

SEQ ID NO: 155455 - protein, 10 aa, synthetic construct
EIMRGDFNNT

SEQ ID NO: 155456 - protein, 10 aa, synthetic construct
EIPRGDFNNT

SEQ ID NO: 155457 - protein, 10 aa, synthetic construct
EIRRGDFNNT

SEQ ID NO: 155458 - protein, 10 aa, synthetic construct
EIVRGDFNNT

SEQ ID NO: 155459 - protein, 10 aa, synthetic construct
EIWRGDFNNT

SEQ ID NO: 155460 - protein, 10 aa, synthetic construct
EIYRGDFNNT

SEQ ID NO: 155461 - protein, 10 aa, synthetic construct
EKARGDFNNT

SEQ ID NO: 155462 - protein, 10 aa, synthetic construct
EKDRGDFNNT

SEQ ID NO: 155463 - protein, 10 aa, synthetic construct
EKERGDFNNT

SEQ ID NO: 155464 - protein, 10 aa, synthetic construct
EKNRGDFNNT

SEQ ID NO: 155465 - protein, 10 aa, synthetic construct
EKQRGDFNNT

SEQ ID NO: 155466 - protein, 10 aa, synthetic construct
EKSRGDFNNT

SEQ ID NO: 155467 - protein, 10 aa, synthetic construct
EKTRGDFNNT

SEQ ID NO: 155468 - protein, 10 aa, synthetic construct
EKFRGDFNNT

SEQ ID NO: 155469 - protein, 10 aa, synthetic construct
EKGRGDFNNT

SEQ ID NO: 155470 - protein, 10 aa, synthetic construct
EKHRGDFNNT

SEQ ID NO: 155471 - protein, 10 aa, synthetic construct
EKIRGDFNNT

SEQ ID NO: 155472 - protein, 10 aa, synthetic construct
EKKRGDFNNT

SEQ ID NO: 155473 - protein, 10 aa, synthetic construct
EKLRGDFNNT

SEQ ID NO: 155474 - protein, 10 aa, synthetic construct
EKMRGDFNNT

SEQ ID NO: 155475 - protein, 10 aa, synthetic construct
EKPRGDFNNT

SEQ ID NO: 155476 - protein, 10 aa, synthetic construct
EKRRGDFNNT

SEQ ID NO: 155477 - protein, 10 aa, synthetic construct
EKVRGDFNNT

SEQ ID NO: 155478 - protein, 10 aa, synthetic construct
EKWRGDFNNT

SEQ ID NO: 155479 - protein, 10 aa, synthetic construct
EKYRGDFNNT

SEQ ID NO: 155480 - protein, 10 aa, synthetic construct
ELARGDFNNT

SEQ ID NO: 155481 - protein, 10 aa, synthetic construct
ELDRGDFNNT

SEQ ID NO: 155482 - protein, 10 aa, synthetic construct
ELERGDFNNT

SEQ ID NO: 155483 - protein, 10 aa, synthetic construct
ELNRGDFNNT

SEQ ID NO: 155484 - protein, 10 aa, synthetic construct
ELQRGDFNNT

SEQ ID NO: 155485 - protein, 10 aa, synthetic construct
ELSRGDFNNT

SEQ ID NO: 155486 - protein, 10 aa, synthetic construct
ELTRGDFNNT

SEQ ID NO: 155487 - protein, 10 aa, synthetic construct
ELFRGDFNNT

SEQ ID NO: 155488 - protein, 10 aa, synthetic construct
ELGRGDFNNT

SEQ ID NO: 155489 - protein, 10 aa, synthetic construct
ELHRGDFNNT

SEQ ID NO: 155490 - protein, 10 aa, synthetic construct
ELIRGDFNNT

SEQ ID NO: 155491 - protein, 10 aa, synthetic construct
ELKRGDFNNT

SEQ ID NO: 155492 - protein, 10 aa, synthetic construct
ELLRGDFNNT

SEQ ID NO: 155493 - protein, 10 aa, synthetic construct
ELMRGDFNNT

SEQ ID NO: 155494 - protein, 10 aa, synthetic construct
ELPRGDFNNT

SEQ ID NO: 155495 - protein, 10 aa, synthetic construct
ELRRGDFNNT

SEQ ID NO: 155496 - protein, 10 aa, synthetic construct
ELVRGDFNNT

SEQ ID NO: 155497 - protein, 10 aa, synthetic construct
ELWRGDFNNT

SEQ ID NO: 155498 - protein, 10 aa, synthetic construct
ELYRGDFNNT

SEQ ID NO: 155499 - protein, 10 aa, synthetic construct
EMARGDFNNT

SEQ ID NO: 155500 - protein, 10 aa, synthetic construct
EMDRGDFNNT

SEQ ID NO: 155501 - protein, 10 aa, synthetic construct
EMERGDFNNT

SEQ ID NO: 155502 - protein, 10 aa, synthetic construct
EMNRGDFNNT

SEQ ID NO: 155503 - protein, 10 aa, synthetic construct
EMQRGDFNNT

SEQ ID NO: 155504 - protein, 10 aa, synthetic construct
EMSRGDFNNT

SEQ ID NO: 155505 - protein, 10 aa, synthetic construct
EMTRGDFNNT

SEQ ID NO: 155506 - protein, 10 aa, synthetic construct
EMFRGDFNNT

SEQ ID NO: 155507 - protein, 10 aa, synthetic construct
EMGRGDFNNT

SEQ ID NO: 155508 - protein, 10 aa, synthetic construct
EMHRGDFNNT

SEQ ID NO: 155509 - protein, 10 aa, synthetic construct
EMIRGDFNNT

SEQ ID NO: 155510 - protein, 10 aa, synthetic construct
EMKRGDFNNT

SEQ ID NO: 155511 - protein, 10 aa, synthetic construct
EMLRGDFNNT

SEQ ID NO: 155512 - protein, 10 aa, synthetic construct
EMMRGDFNNT

SEQ ID NO: 155513 - protein, 10 aa, synthetic construct
EMPRGDFNNT

SEQ ID NO: 155514 - protein, 10 aa, synthetic construct
EMRRGDFNNT

SEQ ID NO: 155515 - protein, 10 aa, synthetic construct
EMVRGDFNNT

SEQ ID NO: 155516 - protein, 10 aa, synthetic construct
EMWRGDFNNT

SEQ ID NO: 155517 - protein, 10 aa, synthetic construct
EMYRGDFNNT

SEQ ID NO: 155518 - protein, 10 aa, synthetic construct
EPARGDFNNT

SEQ ID NO: 155519 - protein, 10 aa, synthetic construct
EPDRGDFNNT

SEQ ID NO: 155520 - protein, 10 aa, synthetic construct
EPERGDFNNT

SEQ ID NO: 155521 - protein, 10 aa, synthetic construct
EPNRGDFNNT

SEQ ID NO: 155522 - protein, 10 aa, synthetic construct
EPQRGDFNNT

SEQ ID NO: 155523 - protein, 10 aa, synthetic construct
EPSRGDFNNT

SEQ ID NO: 155524 - protein, 10 aa, synthetic construct
EPTRGDFNNT

SEQ ID NO: 155525 - protein, 10 aa, synthetic construct
EPFRGDFNNT

SEQ ID NO: 155526 - protein, 10 aa, synthetic construct
EPGRGDFNNT

SEQ ID NO: 155527 - protein, 10 aa, synthetic construct
EPHRGDFNNT

SEQ ID NO: 155528 - protein, 10 aa, synthetic construct
EPIRGDFNNT

SEQ ID NO: 155529 - protein, 10 aa, synthetic construct
EPKRGDFNNT

SEQ ID NO: 155530 - protein, 10 aa, synthetic construct
EPLRGDFNNT

SEQ ID NO: 155531 - protein, 10 aa, synthetic construct
EPMRGDFNNT

SEQ ID NO: 155532 - protein, 10 aa, synthetic construct
EPPRGDFNNT

SEQ ID NO: 155533 - protein, 10 aa, synthetic construct
EPRRGDFNNT

SEQ ID NO: 155534 - protein, 10 aa, synthetic construct
EPVRGDFNNT

SEQ ID NO: 155535 - protein, 10 aa, synthetic construct
EPWRGDFNNT

SEQ ID NO: 155536 - protein, 10 aa, synthetic construct
EPYRGDFNNT

SEQ ID NO: 155537 - protein, 10 aa, synthetic construct
ERARGDFNNT

SEQ ID NO: 155538 - protein, 10 aa, synthetic construct
ERDRGDFNNT

SEQ ID NO: 155539 - protein, 10 aa, synthetic construct
ERERGDFNNT

SEQ ID NO: 155540 - protein, 10 aa, synthetic construct
ERNRGDFNNT

SEQ ID NO: 155541 - protein, 10 aa, synthetic construct
ERQRGDFNNT

SEQ ID NO: 155542 - protein, 10 aa, synthetic construct
ERSRGDFNNT

SEQ ID NO: 155543 - protein, 10 aa, synthetic construct
ERTRGDFNNT

SEQ ID NO: 155544 - protein, 10 aa, synthetic construct
ERFRGDFNNT

SEQ ID NO: 155545 - protein, 10 aa, synthetic construct
ERGRGDFNNT

SEQ ID NO: 155546 - protein, 10 aa, synthetic construct
ERHRGDFNNT

SEQ ID NO: 155547 - protein, 10 aa, synthetic construct
ERIRGDFNNT

SEQ ID NO: 155548 - protein, 10 aa, synthetic construct
ERKRGDFNNT

SEQ ID NO: 155549 - protein, 10 aa, synthetic construct
ERLRGDFNNT

SEQ ID NO: 155550 - protein, 10 aa, synthetic construct
ERMRGDFNNT

SEQ ID NO: 155551 - protein, 10 aa, synthetic construct
ERPRGDFNNT

SEQ ID NO: 155552 - protein, 10 aa, synthetic construct
ERRRGDFNNT

SEQ ID NO: 155553 - protein, 10 aa, synthetic construct
ERVRGDFNNT

SEQ ID NO: 155554 - protein, 10 aa, synthetic construct
ERWRGDFNNT

SEQ ID NO: 155555 - protein, 10 aa, synthetic construct
ERYRGDFNNT

SEQ ID NO: 155556 - protein, 10 aa, synthetic construct
EVARGDFNNT

SEQ ID NO: 155557 - protein, 10 aa, synthetic construct
EVDRGDFNNT

SEQ ID NO: 155558 - protein, 10 aa, synthetic construct
EVERGDFNNT

SEQ ID NO: 155559 - protein, 10 aa, synthetic construct
EVNRGDFNNT

SEQ ID NO: 155560 - protein, 10 aa, synthetic construct
EVQRGDFNNT

SEQ ID NO: 155561 - protein, 10 aa, synthetic construct
EVSRGDFNNT

SEQ ID NO: 155562 - protein, 10 aa, synthetic construct
EVTRGDFNNT

SEQ ID NO: 155563 - protein, 10 aa, synthetic construct
EVFRGDFNNT

SEQ ID NO: 155564 - protein, 10 aa, synthetic construct
EVGRGDFNNT

SEQ ID NO: 155565 - protein, 10 aa, synthetic construct
EVHRGDFNNT

SEQ ID NO: 155566 - protein, 10 aa, synthetic construct
EVIRGDFNNT

SEQ ID NO: 155567 - protein, 10 aa, synthetic construct
EVKRGDFNNT

SEQ ID NO: 155568 - protein, 10 aa, synthetic construct
EVLRGDFNNT

SEQ ID NO: 155569 - protein, 10 aa, synthetic construct
EVMRGDFNNT

SEQ ID NO: 155570 - protein, 10 aa, synthetic construct
EVPRGDFNNT

SEQ ID NO: 155571 - protein, 10 aa, synthetic construct
EVRRGDFNNT

SEQ ID NO: 155572 - protein, 10 aa, synthetic construct
EVVRGDFNNT

SEQ ID NO: 155573 - protein, 10 aa, synthetic construct
EVWRGDFNNT

SEQ ID NO: 155574 - protein, 10 aa, synthetic construct
EVYRGDFNNT

SEQ ID NO: 155575 - protein, 10 aa, synthetic construct
EWARGDFNNT

SEQ ID NO: 155576 - protein, 10 aa, synthetic construct
EWDRGDFNNT

SEQ ID NO: 155577 - protein, 10 aa, synthetic construct
EWERGDFNNT

SEQ ID NO: 155578 - protein, 10 aa, synthetic construct
EWNRGDFNNT

SEQ ID NO: 155579 - protein, 10 aa, synthetic construct
EWQRGDFNNT

SEQ ID NO: 155580 - protein, 10 aa, synthetic construct
EWSRGDFNNT

SEQ ID NO: 155581 - protein, 10 aa, synthetic construct
EWTRGDFNNT

SEQ ID NO: 155582 - protein, 10 aa, synthetic construct
EWFRGDFNNT

SEQ ID NO: 155583 - protein, 10 aa, synthetic construct
EWGRGDFNNT

SEQ ID NO: 155584 - protein, 10 aa, synthetic construct
EWHRGDFNNT

SEQ ID NO: 155585 - protein, 10 aa, synthetic construct
EWIRGDFNNT

SEQ ID NO: 155586 - protein, 10 aa, synthetic construct
EWKRGDFNNT

SEQ ID NO: 155587 - protein, 10 aa, synthetic construct
EWLRGDFNNT

SEQ ID NO: 155588 - protein, 10 aa, synthetic construct
EWMRGDFNNT

SEQ ID NO: 155589 - protein, 10 aa, synthetic construct
EWPRGDFNNT

SEQ ID NO: 155590 - protein, 10 aa, synthetic construct
EWRRGDFNNT

SEQ ID NO: 155591 - protein, 10 aa, synthetic construct
EWVRGDFNNT

SEQ ID NO: 155592 - protein, 10 aa, synthetic construct
EWWRGDFNNT

SEQ ID NO: 155593 - protein, 10 aa, synthetic construct
EWYRGDFNNT

SEQ ID NO: 155594 - protein, 10 aa, synthetic construct
EYARGDFNNT

SEQ ID NO: 155595 - protein, 10 aa, synthetic construct
EYDRGDFNNT

SEQ ID NO: 155596 - protein, 10 aa, synthetic construct
EYERGDFNNT

SEQ ID NO: 155597 - protein, 10 aa, synthetic construct
EYNRGDFNNT

SEQ ID NO: 155598 - protein, 10 aa, synthetic construct
EYQRGDFNNT

SEQ ID NO: 155599 - protein, 10 aa, synthetic construct
EYSRGDFNNT

SEQ ID NO: 155600 - protein, 10 aa, synthetic construct
EYTRGDFNNT

SEQ ID NO: 155601 - protein, 10 aa, synthetic construct
EYFRGDFNNT

SEQ ID NO: 155602 - protein, 10 aa, synthetic construct
EYGRGDFNNT

SEQ ID NO: 155603 - protein, 10 aa, synthetic construct
EYHRGDFNNT

SEQ ID NO: 155604 - protein, 10 aa, synthetic construct
EYIRGDFNNT

SEQ ID NO: 155605 - protein, 10 aa, synthetic construct
EYKRGDFNNT

SEQ ID NO: 155606 - protein, 10 aa, synthetic construct
EYLRGDFNNT

SEQ ID NO: 155607 - protein, 10 aa, synthetic construct
EYMRGDFNNT

SEQ ID NO: 155608 - protein, 10 aa, synthetic construct
EYPRGDFNNT

SEQ ID NO: 155609 - protein, 10 aa, synthetic construct
EYRRGDFNNT

SEQ ID NO: 155610 - protein, 10 aa, synthetic construct
EYVRGDFNNT

SEQ ID NO: 155611 - protein, 10 aa, synthetic construct
EYWRGDFNNT

SEQ ID NO: 155612 - protein, 10 aa, synthetic construct
EYYRGDFNNT

SEQ ID NO: 155613 - protein, 10 aa, synthetic construct
NAARGDFNNT

SEQ ID NO: 155614 - protein, 10 aa, synthetic construct
NADRGDFNNT

SEQ ID NO: 155615 - protein, 10 aa, synthetic construct
NAERGDFNNT

SEQ ID NO: 155616 - protein, 10 aa, synthetic construct
NANRGDFNNT

SEQ ID NO: 155617 - protein, 10 aa, synthetic construct
NAQRGDFNNT

SEQ ID NO: 155618 - protein, 10 aa, synthetic construct
NASRGDFNNT

SEQ ID NO: 155619 - protein, 10 aa, synthetic construct
NATRGDFNNT

SEQ ID NO: 155620 - protein, 10 aa, synthetic construct
NAFRGDFNNT

SEQ ID NO: 155621 - protein, 10 aa, synthetic construct
NAGRGDFNNT

SEQ ID NO: 155622 - protein, 10 aa, synthetic construct
NAHRGDFNNT

SEQ ID NO: 155623 - protein, 10 aa, synthetic construct
NAIRGDFNNT

SEQ ID NO: 155624 - protein, 10 aa, synthetic construct
NAKRGDFNNT

SEQ ID NO: 155625 - protein, 10 aa, synthetic construct
NALRGDFNNT

SEQ ID NO: 155626 - protein, 10 aa, synthetic construct
NAMRGDFNNT

SEQ ID NO: 155627 - protein, 10 aa, synthetic construct
NAPRGDFNNT

SEQ ID NO: 155628 - protein, 10 aa, synthetic construct
NARRGDFNNT

SEQ ID NO: 155629 - protein, 10 aa, synthetic construct
NAVRGDFNNT

SEQ ID NO: 155630 - protein, 10 aa, synthetic construct
NAWRGDFNNT

SEQ ID NO: 155631 - protein, 10 aa, synthetic construct
NAYRGDFNNT

SEQ ID NO: 155632 - protein, 10 aa, synthetic construct
NDARGDFNNT

SEQ ID NO: 155633 - protein, 10 aa, synthetic construct
NDDRGDFNNT

SEQ ID NO: 155634 - protein, 10 aa, synthetic construct
NDERGDFNNT

SEQ ID NO: 155635 - protein, 10 aa, synthetic construct
NDNRGDFNNT

SEQ ID NO: 155636 - protein, 10 aa, synthetic construct
NDQRGDFNNT

SEQ ID NO: 155637 - protein, 10 aa, synthetic construct
NDSRGDFNNT

SEQ ID NO: 155638 - protein, 10 aa, synthetic construct
NDTRGDFNNT

SEQ ID NO: 155639 - protein, 10 aa, synthetic construct
NDFRGDFNNT

SEQ ID NO: 155640 - protein, 10 aa, synthetic construct
NDGRGDFNNT

SEQ ID NO: 155641 - protein, 10 aa, synthetic construct
NDHRGDFNNT

SEQ ID NO: 155642 - protein, 10 aa, synthetic construct
NDIRGDFNNT

SEQ ID NO: 155643 - protein, 10 aa, synthetic construct
NDKRGDFNNT

SEQ ID NO: 155644 - protein, 10 aa, synthetic construct
NDLRGDFNNT

SEQ ID NO: 155645 - protein, 10 aa, synthetic construct
NDMRGDFNNT

SEQ ID NO: 155646 - protein, 10 aa, synthetic construct
NDPRGDFNNT

SEQ ID NO: 155647 - protein, 10 aa, synthetic construct
NDRRGDFNNT

SEQ ID NO: 155648 - protein, 10 aa, synthetic construct
NDVRGDFNNT

SEQ ID NO: 155649 - protein, 10 aa, synthetic construct
NDWRGDFNNT

SEQ ID NO: 155650 - protein, 10 aa, synthetic construct
NDYRGDFNNT

SEQ ID NO: 155651 - protein, 10 aa, synthetic construct
NEARGDFNNT

SEQ ID NO: 155652 - protein, 10 aa, synthetic construct
NEDRGDFNNT

SEQ ID NO: 155653 - protein, 10 aa, synthetic construct
NEERGDFNNT

SEQ ID NO: 155654 - protein, 10 aa, synthetic construct
NENRGDFNNT

SEQ ID NO: 155655 - protein, 10 aa, synthetic construct
NEQRGDFNNT

SEQ ID NO: 155656 - protein, 10 aa, synthetic construct
NESRGDFNNT

SEQ ID NO: 155657 - protein, 10 aa, synthetic construct
NETRGDFNNT

SEQ ID NO: 155658 - protein, 10 aa, synthetic construct
NEFRGDFNNT

SEQ ID NO: 155659 - protein, 10 aa, synthetic construct
NEGRGDFNNT

SEQ ID NO: 155660 - protein, 10 aa, synthetic construct
NEHRGDFNNT

SEQ ID NO: 155661 - protein, 10 aa, synthetic construct
NEIRGDFNNT

SEQ ID NO: 155662 - protein, 10 aa, synthetic construct
NEKRGDFNNT

SEQ ID NO: 155663 - protein, 10 aa, synthetic construct
NELRGDFNNT

SEQ ID NO: 155664 - protein, 10 aa, synthetic construct
NEMRGDFNNT

SEQ ID NO: 155665 - protein, 10 aa, synthetic construct
NEPRGDFNNT

SEQ ID NO: 155666 - protein, 10 aa, synthetic construct
NERRGDFNNT

SEQ ID NO: 155667 - protein, 10 aa, synthetic construct
NEVRGDFNNT

SEQ ID NO: 155668 - protein, 10 aa, synthetic construct
NEWRGDFNNT

SEQ ID NO: 155669 - protein, 10 aa, synthetic construct
NEYRGDFNNT

SEQ ID NO: 155670 - protein, 10 aa, synthetic construct
NNARGDFNNT

SEQ ID NO: 155671 - protein, 10 aa, synthetic construct
NNDRGDFNNT

SEQ ID NO: 155672 - protein, 10 aa, synthetic construct
NNERGDFNNT

SEQ ID NO: 155673 - protein, 10 aa, synthetic construct
NNNRGDFNNT

SEQ ID NO: 155674 - protein, 10 aa, synthetic construct
NNQRGDFNNT

SEQ ID NO: 155675 - protein, 10 aa, synthetic construct
NNSRGDFNNT

SEQ ID NO: 155676 - protein, 10 aa, synthetic construct
NNTRGDFNNT

SEQ ID NO: 155677 - protein, 10 aa, synthetic construct
NNFRGDFNNT

SEQ ID NO: 155678 - protein, 10 aa, synthetic construct
NNGRGDFNNT

SEQ ID NO: 155679 - protein, 10 aa, synthetic construct
NNHRGDFNNT

SEQ ID NO: 155680 - protein, 10 aa, synthetic construct
NNIRGDFNNT

SEQ ID NO: 155681 - protein, 10 aa, synthetic construct
NNKRGDFNNT

SEQ ID NO: 155682 - protein, 10 aa, synthetic construct
NNLRGDFNNT

SEQ ID NO: 155683 - protein, 10 aa, synthetic construct
NNMRGDFNNT

SEQ ID NO: 155684 - protein, 10 aa, synthetic construct
NNPRGDFNNT

SEQ ID NO: 155685 - protein, 10 aa, synthetic construct
NNRRGDFNNT

SEQ ID NO: 155686 - protein, 10 aa, synthetic construct
NNVRGDFNNT

SEQ ID NO: 155687 - protein, 10 aa, synthetic construct
NNWRGDFNNT

SEQ ID NO: 155688 - protein, 10 aa, synthetic construct
NNYRGDFNNT

SEQ ID NO: 155689 - protein, 10 aa, synthetic construct
NQARGDFNNT

SEQ ID NO: 155690 - protein, 10 aa, synthetic construct
NQDRGDFNNT

SEQ ID NO: 155691 - protein, 10 aa, synthetic construct
NQERGDFNNT

SEQ ID NO: 155692 - protein, 10 aa, synthetic construct
NQNRGDFNNT

SEQ ID NO: 155693 - protein, 10 aa, synthetic construct
NQQRGDFNNT

SEQ ID NO: 155694 - protein, 10 aa, synthetic construct
NQSRGDFNNT

SEQ ID NO: 155695 - protein, 10 aa, synthetic construct
NQTRGDFNNT

SEQ ID NO: 155696 - protein, 10 aa, synthetic construct
NQFRGDFNNT

SEQ ID NO: 155697 - protein, 10 aa, synthetic construct
NQGRGDFNNT

SEQ ID NO: 155698 - protein, 10 aa, synthetic construct
NQHRGDFNNT

SEQ ID NO: 155699 - protein, 10 aa, synthetic construct
NQIRGDFNNT

SEQ ID NO: 155700 - protein, 10 aa, synthetic construct
NQKRGDFNNT

SEQ ID NO: 155701 - protein, 10 aa, synthetic construct
NQLRGDFNNT

SEQ ID NO: 155702 - protein, 10 aa, synthetic construct
NQMRGDFNNT

SEQ ID NO: 155703 - protein, 10 aa, synthetic construct
NQPRGDFNNT

SEQ ID NO: 155704 - protein, 10 aa, synthetic construct
NQRRGDFNNT

SEQ ID NO: 155705 - protein, 10 aa, synthetic construct
NQVRGDFNNT

SEQ ID NO: 155706 - protein, 10 aa, synthetic construct
NQWRGDFNNT

SEQ ID NO: 155707 - protein, 10 aa, synthetic construct
NQYRGDFNNT

SEQ ID NO: 155708 - protein, 10 aa, synthetic construct
NSARGDFNNT

SEQ ID NO: 155709 - protein, 10 aa, synthetic construct
NSDRGDFNNT

SEQ ID NO: 155710 - protein, 10 aa, synthetic construct
NSERGDFNNT

SEQ ID NO: 155711 - protein, 10 aa, synthetic construct
NSNRGDFNNT

SEQ ID NO: 155712 - protein, 10 aa, synthetic construct
NSQRGDFNNT

SEQ ID NO: 155713 - protein, 10 aa, synthetic construct
NSSRGDFNNT

SEQ ID NO: 155714 - protein, 10 aa, synthetic construct
NSTRGDFNNT

SEQ ID NO: 155715 - protein, 10 aa, synthetic construct
NSFRGDFNNT

SEQ ID NO: 155716 - protein, 10 aa, synthetic construct
NSGRGDFNNT

SEQ ID NO: 155717 - protein, 10 aa, synthetic construct
NSHRGDFNNT

SEQ ID NO: 155718 - protein, 10 aa, synthetic construct
NSIRGDFNNT

SEQ ID NO: 155719 - protein, 10 aa, synthetic construct
NSKRGDFNNT

SEQ ID NO: 155720 - protein, 10 aa, synthetic construct
NSLRGDFNNT

SEQ ID NO: 155721 - protein, 10 aa, synthetic construct
NSMRGDFNNT

SEQ ID NO: 155722 - protein, 10 aa, synthetic construct
NSPRGDFNNT

SEQ ID NO: 155723 - protein, 10 aa, synthetic construct
NSRRGDFNNT

SEQ ID NO: 155724 - protein, 10 aa, synthetic construct
NSVRGDFNNT

SEQ ID NO: 155725 - protein, 10 aa, synthetic construct
NSWRGDFNNT

SEQ ID NO: 155726 - protein, 10 aa, synthetic construct
NSYRGDFNNT

SEQ ID NO: 155727 - protein, 10 aa, synthetic construct
NTARGDFNNT

SEQ ID NO: 155728 - protein, 10 aa, synthetic construct
NTDRGDFNNT

SEQ ID NO: 155729 - protein, 10 aa, synthetic construct
NTERGDFNNT

SEQ ID NO: 155730 - protein, 10 aa, synthetic construct
NTNRGDFNNT

SEQ ID NO: 155731 - protein, 10 aa, synthetic construct
NTQRGDFNNT

SEQ ID NO: 155732 - protein, 10 aa, synthetic construct
NTSRGDFNNT

SEQ ID NO: 155733 - protein, 10 aa, synthetic construct
NTTRGDFNNT

SEQ ID NO: 155734 - protein, 10 aa, synthetic construct
NTFRGDFNNT

SEQ ID NO: 155735 - protein, 10 aa, synthetic construct
NTGRGDFNNT

SEQ ID NO: 155736 - protein, 10 aa, synthetic construct
NTHRGDFNNT

SEQ ID NO: 155737 - protein, 10 aa, synthetic construct
NTIRGDFNNT

SEQ ID NO: 155738 - protein, 10 aa, synthetic construct
NTKRGDFNNT

SEQ ID NO: 155739 - protein, 10 aa, synthetic construct
NTLRGDFNNT

SEQ ID NO: 155740 - protein, 10 aa, synthetic construct
NTMRGDFNNT

SEQ ID NO: 155741 - protein, 10 aa, synthetic construct
NTPRGDFNNT

SEQ ID NO: 155742 - protein, 10 aa, synthetic construct
NTRRGDFNNT

SEQ ID NO: 155743 - protein, 10 aa, synthetic construct
NTVRGDFNNT

SEQ ID NO: 155744 - protein, 10 aa, synthetic construct
NTWRGDFNNT

SEQ ID NO: 155745 - protein, 10 aa, synthetic construct
NTYRGDFNNT

SEQ ID NO: 155746 - protein, 10 aa, synthetic construct
NFARGDFNNT

SEQ ID NO: 155747 - protein, 10 aa, synthetic construct
NFDRGDFNNT

SEQ ID NO: 155748 - protein, 10 aa, synthetic construct
NFERGDFNNT

SEQ ID NO: 155749 - protein, 10 aa, synthetic construct
NFNRGDFNNT

SEQ ID NO: 155750 - protein, 10 aa, synthetic construct
NFQRGDFNNT

SEQ ID NO: 155751 - protein, 10 aa, synthetic construct
NFSRGDFNNT

SEQ ID NO: 155752 - protein, 10 aa, synthetic construct
NFTRGDFNNT

SEQ ID NO: 155753 - protein, 10 aa, synthetic construct
NFFRGDFNNT

SEQ ID NO: 155754 - protein, 10 aa, synthetic construct
NFGRGDFNNT

SEQ ID NO: 155755 - protein, 10 aa, synthetic construct
NFHRGDFNNT

SEQ ID NO: 155756 - protein, 10 aa, synthetic construct
NFIRGDFNNT

SEQ ID NO: 155757 - protein, 10 aa, synthetic construct
NFKRGDFNNT

SEQ ID NO: 155758 - protein, 10 aa, synthetic construct
NFLRGDFNNT

SEQ ID NO: 155759 - protein, 10 aa, synthetic construct
NFMRGDFNNT

SEQ ID NO: 155760 - protein, 10 aa, synthetic construct
NFPRGDFNNT

SEQ ID NO: 155761 - protein, 10 aa, synthetic construct
NFRRGDFNNT

SEQ ID NO: 155762 - protein, 10 aa, synthetic construct
NFVRGDFNNT

SEQ ID NO: 155763 - protein, 10 aa, synthetic construct
NFWRGDFNNT

SEQ ID NO: 155764 - protein, 10 aa, synthetic construct
NFYRGDFNNT

SEQ ID NO: 155765 - protein, 10 aa, synthetic construct
NGARGDFNNT

SEQ ID NO: 155766 - protein, 10 aa, synthetic construct
NGDRGDFNNT

SEQ ID NO: 155767 - protein, 10 aa, synthetic construct
NGERGDFNNT

SEQ ID NO: 155768 - protein, 10 aa, synthetic construct
NGNRGDFNNT

SEQ ID NO: 155769 - protein, 10 aa, synthetic construct
NGQRGDFNNT

SEQ ID NO: 155770 - protein, 10 aa, synthetic construct
NGSRGDFNNT

SEQ ID NO: 155771 - protein, 10 aa, synthetic construct
NGTRGDFNNT

SEQ ID NO: 155772 - protein, 10 aa, synthetic construct
NGFRGDFNNT

SEQ ID NO: 155773 - protein, 10 aa, synthetic construct
NGGRGDFNNT

SEQ ID NO: 155774 - protein, 10 aa, synthetic construct
NGHRGDFNNT

SEQ ID NO: 155775 - protein, 10 aa, synthetic construct
NGIRGDFNNT

SEQ ID NO: 155776 - protein, 10 aa, synthetic construct
NGKRGDFNNT

SEQ ID NO: 155777 - protein, 10 aa, synthetic construct
NGLRGDFNNT

SEQ ID NO: 155778 - protein, 10 aa, synthetic construct
NGMRGDFNNT

SEQ ID NO: 155779 - protein, 10 aa, synthetic construct
NGPRGDFNNT

SEQ ID NO: 155780 - protein, 10 aa, synthetic construct
NGRRGDFNNT

SEQ ID NO: 155781 - protein, 10 aa, synthetic construct
NGVRGDFNNT

SEQ ID NO: 155782 - protein, 10 aa, synthetic construct
NGWRGDFNNT

SEQ ID NO: 155783 - protein, 10 aa, synthetic construct
NGYRGDFNNT

SEQ ID NO: 155784 - protein, 10 aa, synthetic construct
NHARGDFNNT

SEQ ID NO: 155785 - protein, 10 aa, synthetic construct
NHDRGDFNNT

SEQ ID NO: 155786 - protein, 10 aa, synthetic construct
NHERGDFNNT

SEQ ID NO: 155787 - protein, 10 aa, synthetic construct
NHNRGDFNNT

SEQ ID NO: 155788 - protein, 10 aa, synthetic construct
NHQRGDFNNT

SEQ ID NO: 155789 - protein, 10 aa, synthetic construct
NHSRGDFNNT

SEQ ID NO: 155790 - protein, 10 aa, synthetic construct
NHTRGDFNNT

SEQ ID NO: 155791 - protein, 10 aa, synthetic construct
NHFRGDFNNT

SEQ ID NO: 155792 - protein, 10 aa, synthetic construct
NHGRGDFNNT

SEQ ID NO: 155793 - protein, 10 aa, synthetic construct
NHHRGDFNNT

SEQ ID NO: 155794 - protein, 10 aa, synthetic construct
NHIRGDFNNT

SEQ ID NO: 155795 - protein, 10 aa, synthetic construct
NHKRGDFNNT

SEQ ID NO: 155796 - protein, 10 aa, synthetic construct
NHLRGDFNNT

SEQ ID NO: 155797 - protein, 10 aa, synthetic construct
NHMRGDFNNT

SEQ ID NO: 155798 - protein, 10 aa, synthetic construct
NHPRGDFNNT

SEQ ID NO: 155799 - protein, 10 aa, synthetic construct
NHRRGDFNNT

SEQ ID NO: 155800 - protein, 10 aa, synthetic construct
NHVRGDFNNT

SEQ ID NO: 155801 - protein, 10 aa, synthetic construct
NHWRGDFNNT

SEQ ID NO: 155802 - protein, 10 aa, synthetic construct
NHYRGDFNNT

SEQ ID NO: 155803 - protein, 10 aa, synthetic construct
NIARGDFNNT

SEQ ID NO: 155804 - protein, 10 aa, synthetic construct
NIDRGDFNNT

SEQ ID NO: 155805 - protein, 10 aa, synthetic construct
NIERGDFNNT

SEQ ID NO: 155806 - protein, 10 aa, synthetic construct
NINRGDFNNT

SEQ ID NO: 155807 - protein, 10 aa, synthetic construct
NIQRGDFNNT

SEQ ID NO: 155808 - protein, 10 aa, synthetic construct
NISRGDFNNT

SEQ ID NO: 155809 - protein, 10 aa, synthetic construct
NITRGDFNNT

SEQ ID NO: 155810 - protein, 10 aa, synthetic construct
NIFRGDFNNT

SEQ ID NO: 155811 - protein, 10 aa, synthetic construct
NIGRGDFNNT

SEQ ID NO: 155812 - protein, 10 aa, synthetic construct
NIHRGDFNNT

SEQ ID NO: 155813 - protein, 10 aa, synthetic construct
NIIRGDFNNT

SEQ ID NO: 155814 - protein, 10 aa, synthetic construct
NIKRGDFNNT

SEQ ID NO: 155815 - protein, 10 aa, synthetic construct
NILRGDFNNT

SEQ ID NO: 155816 - protein, 10 aa, synthetic construct
NIMRGDFNNT

SEQ ID NO: 155817 - protein, 10 aa, synthetic construct
NIPRGDFNNT

SEQ ID NO: 155818 - protein, 10 aa, synthetic construct
NIRRGDFNNT

SEQ ID NO: 155819 - protein, 10 aa, synthetic construct
NIVRGDFNNT

SEQ ID NO: 155820 - protein, 10 aa, synthetic construct
NIWRGDFNNT

SEQ ID NO: 155821 - protein, 10 aa, synthetic construct
NIYRGDFNNT

SEQ ID NO: 155822 - protein, 10 aa, synthetic construct
NKARGDFNNT

SEQ ID NO: 155823 - protein, 10 aa, synthetic construct
NKDRGDFNNT

SEQ ID NO: 155824 - protein, 10 aa, synthetic construct
NKERGDFNNT

SEQ ID NO: 155825 - protein, 10 aa, synthetic construct
NKNRGDFNNT

SEQ ID NO: 155826 - protein, 10 aa, synthetic construct
NKQRGDFNNT

SEQ ID NO: 155827 - protein, 10 aa, synthetic construct
NKSRGDFNNT

SEQ ID NO: 155828 - protein, 10 aa, synthetic construct
NKTRGDFNNT

SEQ ID NO: 155829 - protein, 10 aa, synthetic construct
NKFRGDFNNT

SEQ ID NO: 155830 - protein, 10 aa, synthetic construct
NKGRGDFNNT

SEQ ID NO: 155831 - protein, 10 aa, synthetic construct
NKHRGDFNNT

SEQ ID NO: 155832 - protein, 10 aa, synthetic construct
NKIRGDFNNT

SEQ ID NO: 155833 - protein, 10 aa, synthetic construct
NKKRGDFNNT

SEQ ID NO: 155834 - protein, 10 aa, synthetic construct
NKLRGDFNNT

SEQ ID NO: 155835 - protein, 10 aa, synthetic construct
NKMRGDFNNT

SEQ ID NO: 155836 - protein, 10 aa, synthetic construct
NKPRGDFNNT

SEQ ID NO: 155837 - protein, 10 aa, synthetic construct
NKRRGDFNNT

SEQ ID NO: 155838 - protein, 10 aa, synthetic construct
NKVRGDFNNT

SEQ ID NO: 155839 - protein, 10 aa, synthetic construct
NKWRGDFNNT

SEQ ID NO: 155840 - protein, 10 aa, synthetic construct
NKYRGDFNNT

SEQ ID NO: 155841 - protein, 10 aa, synthetic construct
NLARGDFNNT

SEQ ID NO: 155842 - protein, 10 aa, synthetic construct
NLDRGDFNNT

SEQ ID NO: 155843 - protein, 10 aa, synthetic construct
NLERGDFNNT

SEQ ID NO: 155844 - protein, 10 aa, synthetic construct
NLNRGDFNNT

SEQ ID NO: 155845 - protein, 10 aa, synthetic construct
NLQRGDFNNT

SEQ ID NO: 155846 - protein, 10 aa, synthetic construct
NLSRGDFNNT

SEQ ID NO: 155847 - protein, 10 aa, synthetic construct
NLTRGDFNNT

SEQ ID NO: 155848 - protein, 10 aa, synthetic construct
NLFRGDFNNT

SEQ ID NO: 155849 - protein, 10 aa, synthetic construct
NLGRGDFNNT

SEQ ID NO: 155850 - protein, 10 aa, synthetic construct
NLHRGDFNNT

SEQ ID NO: 155851 - protein, 10 aa, synthetic construct
NLIRGDFNNT

SEQ ID NO: 155852 - protein, 10 aa, synthetic construct
NLKRGDFNNT

SEQ ID NO: 155853 - protein, 10 aa, synthetic construct
NLLRGDFNNT

SEQ ID NO: 155854 - protein, 10 aa, synthetic construct
NLMRGDFNNT

SEQ ID NO: 155855 - protein, 10 aa, synthetic construct
NLPRGDFNNT

SEQ ID NO: 155856 - protein, 10 aa, synthetic construct
NLRRGDFNNT

SEQ ID NO: 155857 - protein, 10 aa, synthetic construct
NLVRGDFNNT

SEQ ID NO: 155858 - protein, 10 aa, synthetic construct
NLWRGDFNNT

SEQ ID NO: 155859 - protein, 10 aa, synthetic construct
NLYRGDFNNT

SEQ ID NO: 155860 - protein, 10 aa, synthetic construct
NMARGDFNNT

SEQ ID NO: 155861 - protein, 10 aa, synthetic construct
NMDRGDFNNT

SEQ ID NO: 155862 - protein, 10 aa, synthetic construct
NMERGDFNNT

SEQ ID NO: 155863 - protein, 10 aa, synthetic construct
NMNRGDFNNT

SEQ ID NO: 155864 - protein, 10 aa, synthetic construct
NMQRGDFNNT

SEQ ID NO: 155865 - protein, 10 aa, synthetic construct
NMSRGDFNNT

SEQ ID NO: 155866 - protein, 10 aa, synthetic construct
NMTRGDFNNT

SEQ ID NO: 155867 - protein, 10 aa, synthetic construct
NMFRGDFNNT

SEQ ID NO: 155868 - protein, 10 aa, synthetic construct
NMGRGDFNNT

SEQ ID NO: 155869 - protein, 10 aa, synthetic construct
NMHRGDFNNT

SEQ ID NO: 155870 - protein, 10 aa, synthetic construct
NMIRGDFNNT

SEQ ID NO: 155871 - protein, 10 aa, synthetic construct
NMKRGDFNNT

SEQ ID NO: 155872 - protein, 10 aa, synthetic construct
NMLRGDFNNT

SEQ ID NO: 155873 - protein, 10 aa, synthetic construct
NMMRGDFNNT

SEQ ID NO: 155874 - protein, 10 aa, synthetic construct
NMPRGDFNNT

SEQ ID NO: 155875 - protein, 10 aa, synthetic construct
NMRRGDFNNT

SEQ ID NO: 155876 - protein, 10 aa, synthetic construct
NMVRGDFNNT

SEQ ID NO: 155877 - protein, 10 aa, synthetic construct
NMWRGDFNNT

SEQ ID NO: 155878 - protein, 10 aa, synthetic construct
NMYRGDFNNT

SEQ ID NO: 155879 - protein, 10 aa, synthetic construct
NPARGDFNNT

SEQ ID NO: 155880 - protein, 10 aa, synthetic construct
NPDRGDFNNT

SEQ ID NO: 155881 - protein, 10 aa, synthetic construct
NPERGDFNNT

SEQ ID NO: 155882 - protein, 10 aa, synthetic construct
NPNRGDFNNT

SEQ ID NO: 155883 - protein, 10 aa, synthetic construct
NPQRGDFNNT

SEQ ID NO: 155884 - protein, 10 aa, synthetic construct
NPSRGDFNNT

SEQ ID NO: 155885 - protein, 10 aa, synthetic construct
NPTRGDFNNT

SEQ ID NO: 155886 - protein, 10 aa, synthetic construct
NPFRGDFNNT

SEQ ID NO: 155887 - protein, 10 aa, synthetic construct
NPGRGDFNNT

SEQ ID NO: 155888 - protein, 10 aa, synthetic construct
NPHRGDFNNT

SEQ ID NO: 155889 - protein, 10 aa, synthetic construct
NPIRGDFNNT

SEQ ID NO: 155890 - protein, 10 aa, synthetic construct
NPKRGDFNNT

SEQ ID NO: 155891 - protein, 10 aa, synthetic construct
NPLRGDFNNT

SEQ ID NO: 155892 - protein, 10 aa, synthetic construct
NPMRGDFNNT

SEQ ID NO: 155893 - protein, 10 aa, synthetic construct
NPPRGDFNNT

SEQ ID NO: 155894 - protein, 10 aa, synthetic construct
NPRRGDFNNT

SEQ ID NO: 155895 - protein, 10 aa, synthetic construct
NPVRGDFNNT

SEQ ID NO: 155896 - protein, 10 aa, synthetic construct
NPWRGDFNNT

SEQ ID NO: 155897 - protein, 10 aa, synthetic construct
NPYRGDFNNT

SEQ ID NO: 155898 - protein, 10 aa, synthetic construct
NRARGDFNNT

SEQ ID NO: 155899 - protein, 10 aa, synthetic construct
NRDRGDFNNT

SEQ ID NO: 155900 - protein, 10 aa, synthetic construct
NRERGDFNNT

SEQ ID NO: 155901 - protein, 10 aa, synthetic construct
NRNRGDFNNT

SEQ ID NO: 155902 - protein, 10 aa, synthetic construct
NRQRGDFNNT

SEQ ID NO: 155903 - protein, 10 aa, synthetic construct
NRSRGDFNNT

SEQ ID NO: 155904 - protein, 10 aa, synthetic construct
NRTRGDFNNT

SEQ ID NO: 155905 - protein, 10 aa, synthetic construct
NRFRGDFNNT

SEQ ID NO: 155906 - protein, 10 aa, synthetic construct
NRGRGDFNNT

SEQ ID NO: 155907 - protein, 10 aa, synthetic construct
NRHRGDFNNT

SEQ ID NO: 155908 - protein, 10 aa, synthetic construct
NRIRGDFNNT

SEQ ID NO: 155909 - protein, 10 aa, synthetic construct
NRKRGDFNNT

SEQ ID NO: 155910 - protein, 10 aa, synthetic construct
NRLRGDFNNT

SEQ ID NO: 155911 - protein, 10 aa, synthetic construct
NRMRGDFNNT

SEQ ID NO: 155912 - protein, 10 aa, synthetic construct
NRPRGDFNNT

SEQ ID NO: 155913 - protein, 10 aa, synthetic construct
NRRRGDFNNT

SEQ ID NO: 155914 - protein, 10 aa, synthetic construct
NRVRGDFNNT

SEQ ID NO: 155915 - protein, 10 aa, synthetic construct
NRWRGDFNNT

SEQ ID NO: 155916 - protein, 10 aa, synthetic construct
NRYRGDFNNT

SEQ ID NO: 155917 - protein, 10 aa, synthetic construct
NVARGDFNNT

SEQ ID NO: 155918 - protein, 10 aa, synthetic construct
NVDRGDFNNT

SEQ ID NO: 155919 - protein, 10 aa, synthetic construct
NVERGDFNNT

SEQ ID NO: 155920 - protein, 10 aa, synthetic construct
NVNRGDFNNT

SEQ ID NO: 155921 - protein, 10 aa, synthetic construct
NVQRGDFNNT

SEQ ID NO: 155922 - protein, 10 aa, synthetic construct
NVSRGDFNNT

SEQ ID NO: 155923 - protein, 10 aa, synthetic construct
NVTRGDFNNT

SEQ ID NO: 155924 - protein, 10 aa, synthetic construct
NVFRGDFNNT

SEQ ID NO: 155925 - protein, 10 aa, synthetic construct
NVGRGDFNNT

SEQ ID NO: 155926 - protein, 10 aa, synthetic construct
NVHRGDFNNT

SEQ ID NO: 155927 - protein, 10 aa, synthetic construct
NVIRGDFNNT

SEQ ID NO: 155928 - protein, 10 aa, synthetic construct
NVKRGDFNNT

SEQ ID NO: 155929 - protein, 10 aa, synthetic construct
NVLRGDFNNT

SEQ ID NO: 155930 - protein, 10 aa, synthetic construct
NVMRGDFNNT

SEQ ID NO: 155931 - protein, 10 aa, synthetic construct
NVPRGDFNNT

SEQ ID NO: 155932 - protein, 10 aa, synthetic construct
NVRRGDFNNT

SEQ ID NO: 155933 - protein, 10 aa, synthetic construct
NVVRGDFNNT

SEQ ID NO: 155934 - protein, 10 aa, synthetic construct
NVWRGDFNNT

SEQ ID NO: 155935 - protein, 10 aa, synthetic construct
NVYRGDFNNT

SEQ ID NO: 155936 - protein, 10 aa, synthetic construct
NWARGDFNNT

SEQ ID NO: 155937 - protein, 10 aa, synthetic construct
NWDRGDFNNT

SEQ ID NO: 155938 - protein, 10 aa, synthetic construct
NWERGDFNNT

SEQ ID NO: 155939 - protein, 10 aa, synthetic construct
NWNRGDFNNT

SEQ ID NO: 155940 - protein, 10 aa, synthetic construct
NWQRGDFNNT

SEQ ID NO: 155941 - protein, 10 aa, synthetic construct
NWSRGDFNNT

SEQ ID NO: 155942 - protein, 10 aa, synthetic construct
NWTRGDFNNT

SEQ ID NO: 155943 - protein, 10 aa, synthetic construct
NWFRGDFNNT

SEQ ID NO: 155944 - protein, 10 aa, synthetic construct
NWGRGDFNNT

SEQ ID NO: 155945 - protein, 10 aa, synthetic construct
NWHRGDFNNT

SEQ ID NO: 155946 - protein, 10 aa, synthetic construct
NWIRGDFNNT

SEQ ID NO: 155947 - protein, 10 aa, synthetic construct
NWKRGDFNNT

SEQ ID NO: 155948 - protein, 10 aa, synthetic construct
NWLRGDFNNT

SEQ ID NO: 155949 - protein, 10 aa, synthetic construct
NWMRGDFNNT

SEQ ID NO: 155950 - protein, 10 aa, synthetic construct
NWPRGDFNNT

SEQ ID NO: 155951 - protein, 10 aa, synthetic construct
NWRRGDFNNT

SEQ ID NO: 155952 - protein, 10 aa, synthetic construct
NWVRGDFNNT

SEQ ID NO: 155953 - protein, 10 aa, synthetic construct
NWWRGDFNNT

SEQ ID NO: 155954 - protein, 10 aa, synthetic construct
NWYRGDFNNT

SEQ ID NO: 155955 - protein, 10 aa, synthetic construct
NYARGDFNNT

SEQ ID NO: 155956 - protein, 10 aa, synthetic construct
NYDRGDFNNT

SEQ ID NO: 155957 - protein, 10 aa, synthetic construct
NYERGDFNNT

SEQ ID NO: 155958 - protein, 10 aa, synthetic construct
NYNRGDFNNT

SEQ ID NO: 155959 - protein, 10 aa, synthetic construct
NYQRGDFNNT

SEQ ID NO: 155960 - protein, 10 aa, synthetic construct
NYSRGDFNNT

SEQ ID NO: 155961 - protein, 10 aa, synthetic construct
NYTRGDFNNT

SEQ ID NO: 155962 - protein, 10 aa, synthetic construct
NYFRGDFNNT

SEQ ID NO: 155963 - protein, 10 aa, synthetic construct
NYGRGDFNNT

SEQ ID NO: 155964 - protein, 10 aa, synthetic construct
NYHRGDFNNT

SEQ ID NO: 155965 - protein, 10 aa, synthetic construct
NYIRGDFNNT

SEQ ID NO: 155966 - protein, 10 aa, synthetic construct
NYKRGDFNNT

SEQ ID NO: 155967 - protein, 10 aa, synthetic construct
NYLRGDFNNT

SEQ ID NO: 155968 - protein, 10 aa, synthetic construct
NYMRGDFNNT

SEQ ID NO: 155969 - protein, 10 aa, synthetic construct
NYPRGDFNNT

SEQ ID NO: 155970 - protein, 10 aa, synthetic construct
NYRRGDFNNT

SEQ ID NO: 155971 - protein, 10 aa, synthetic construct
NYVRGDFNNT

SEQ ID NO: 155972 - protein, 10 aa, synthetic construct
NYWRGDFNNT

SEQ ID NO: 155973 - protein, 10 aa, synthetic construct
NYYRGDFNNT

SEQ ID NO: 155974 - protein, 10 aa, synthetic construct
QAARGDFNNT

SEQ ID NO: 155975 - protein, 10 aa, synthetic construct
QADRGDFNNT

SEQ ID NO: 155976 - protein, 10 aa, synthetic construct
QAERGDFNNT

SEQ ID NO: 155977 - protein, 10 aa, synthetic construct
QANRGDFNNT

SEQ ID NO: 155978 - protein, 10 aa, synthetic construct
QAQRGDFNNT

SEQ ID NO: 155979 - protein, 10 aa, synthetic construct
QASRGDFNNT

SEQ ID NO: 155980 - protein, 10 aa, synthetic construct
QATRGDFNNT

SEQ ID NO: 155981 - protein, 10 aa, synthetic construct
QAFRGDFNNT

SEQ ID NO: 155982 - protein, 10 aa, synthetic construct
QAGRGDFNNT

SEQ ID NO: 155983 - protein, 10 aa, synthetic construct
QAHRGDFNNT

SEQ ID NO: 155984 - protein, 10 aa, synthetic construct
QAIRGDFNNT

SEQ ID NO: 155985 - protein, 10 aa, synthetic construct
QAKRGDFNNT

SEQ ID NO: 155986 - protein, 10 aa, synthetic construct
QALRGDFNNT

SEQ ID NO: 155987 - protein, 10 aa, synthetic construct
QAMRGDFNNT

SEQ ID NO: 155988 - protein, 10 aa, synthetic construct
QAPRGDFNNT

SEQ ID NO: 155989 - protein, 10 aa, synthetic construct
QARRGDFNNT

SEQ ID NO: 155990 - protein, 10 aa, synthetic construct
QAVRGDFNNT

SEQ ID NO: 155991 - protein, 10 aa, synthetic construct
QAWRGDFNNT

SEQ ID NO: 155992 - protein, 10 aa, synthetic construct
QAYRGDFNNT

SEQ ID NO: 155993 - protein, 10 aa, synthetic construct
QDARGDFNNT

SEQ ID NO: 155994 - protein, 10 aa, synthetic construct
QDDRGDFNNT

SEQ ID NO: 155995 - protein, 10 aa, synthetic construct
QDERGDFNNT

SEQ ID NO: 155996 - protein, 10 aa, synthetic construct
QDNRGDFNNT

SEQ ID NO: 155997 - protein, 10 aa, synthetic construct
QDQRGDFNNT

SEQ ID NO: 155998 - protein, 10 aa, synthetic construct
QDSRGDFNNT

SEQ ID NO: 155999 - protein, 10 aa, synthetic construct
QDTRGDFNNT

SEQ ID NO: 156000 - protein, 10 aa, synthetic construct
QDFRGDFNNT

SEQ ID NO: 156001 - protein, 10 aa, synthetic construct
QDGRGDFNNT

SEQ ID NO: 156002 - protein, 10 aa, synthetic construct
QDHRGDFNNT

SEQ ID NO: 156003 - protein, 10 aa, synthetic construct
QDIRGDFNNT

SEQ ID NO: 156004 - protein, 10 aa, synthetic construct
QDKRGDFNNT

SEQ ID NO: 156005 - protein, 10 aa, synthetic construct
QDLRGDFNNT

SEQ ID NO: 156006 - protein, 10 aa, synthetic construct
QDMRGDFNNT

SEQ ID NO: 156007 - protein, 10 aa, synthetic construct
QDPRGDFNNT

SEQ ID NO: 156008 - protein, 10 aa, synthetic construct
QDRRGDFNNT

SEQ ID NO: 156009 - protein, 10 aa, synthetic construct
QDVRGDFNNT

SEQ ID NO: 156010 - protein, 10 aa, synthetic construct
QDWRGDFNNT

SEQ ID NO: 156011 - protein, 10 aa, synthetic construct
QDYRGDFNNT

SEQ ID NO: 156012 - protein, 10 aa, synthetic construct
QEARGDFNNT

SEQ ID NO: 156013 - protein, 10 aa, synthetic construct
QEDRGDFNNT

SEQ ID NO: 156014 - protein, 10 aa, synthetic construct
QEERGDFNNT

SEQ ID NO: 156015 - protein, 10 aa, synthetic construct
QENRGDFNNT

SEQ ID NO: 156016 - protein, 10 aa, synthetic construct
QEQRGDFNNT

SEQ ID NO: 156017 - protein, 10 aa, synthetic construct
QESRGDFNNT

SEQ ID NO: 156018 - protein, 10 aa, synthetic construct
QETRGDFNNT

SEQ ID NO: 156019 - protein, 10 aa, synthetic construct
QEFRGDFNNT

SEQ ID NO: 156020 - protein, 10 aa, synthetic construct
QEGRGDFNNT

SEQ ID NO: 156021 - protein, 10 aa, synthetic construct
QEHRGDFNNT

SEQ ID NO: 156022 - protein, 10 aa, synthetic construct
QEIRGDFNNT

SEQ ID NO: 156023 - protein, 10 aa, synthetic construct
QEKRGDFNNT

SEQ ID NO: 156024 - protein, 10 aa, synthetic construct
QELRGDFNNT

SEQ ID NO: 156025 - protein, 10 aa, synthetic construct
QEMRGDFNNT

SEQ ID NO: 156026 - protein, 10 aa, synthetic construct
QEPRGDFNNT

SEQ ID NO: 156027 - protein, 10 aa, synthetic construct
QERRGDFNNT

SEQ ID NO: 156028 - protein, 10 aa, synthetic construct
QEVRGDFNNT

SEQ ID NO: 156029 - protein, 10 aa, synthetic construct
QEWRGDFNNT

SEQ ID NO: 156030 - protein, 10 aa, synthetic construct
QEYRGDFNNT

SEQ ID NO: 156031 - protein, 10 aa, synthetic construct
QNARGDFNNT

SEQ ID NO: 156032 - protein, 10 aa, synthetic construct
QNDRGDFNNT

SEQ ID NO: 156033 - protein, 10 aa, synthetic construct
QNERGDFNNT

SEQ ID NO: 156034 - protein, 10 aa, synthetic construct
QNNRGDFNNT

SEQ ID NO: 156035 - protein, 10 aa, synthetic construct
QNQRGDFNNT

SEQ ID NO: 156036 - protein, 10 aa, synthetic construct
QNSRGDFNNT

SEQ ID NO: 156037 - protein, 10 aa, synthetic construct
QNTRGDFNNT

SEQ ID NO: 156038 - protein, 10 aa, synthetic construct
QNFRGDFNNT

SEQ ID NO: 156039 - protein, 10 aa, synthetic construct
QNGRGDFNNT

SEQ ID NO: 156040 - protein, 10 aa, synthetic construct
QNHRGDFNNT

SEQ ID NO: 156041 - protein, 10 aa, synthetic construct
QNIRGDFNNT

SEQ ID NO: 156042 - protein, 10 aa, synthetic construct
QNKRGDFNNT

SEQ ID NO: 156043 - protein, 10 aa, synthetic construct
QNLRGDFNNT

SEQ ID NO: 156044 - protein, 10 aa, synthetic construct
QNMRGDFNNT

SEQ ID NO: 156045 - protein, 10 aa, synthetic construct
QNPRGDFNNT

SEQ ID NO: 156046 - protein, 10 aa, synthetic construct
QNRRGDFNNT

SEQ ID NO: 156047 - protein, 10 aa, synthetic construct
QNVRGDFNNT

SEQ ID NO: 156048 - protein, 10 aa, synthetic construct
QNWRGDFNNT

SEQ ID NO: 156049 - protein, 10 aa, synthetic construct
QNYRGDFNNT

SEQ ID NO: 156050 - protein, 10 aa, synthetic construct
QQARGDFNNT

SEQ ID NO: 156051 - protein, 10 aa, synthetic construct
QQDRGDFNNT

SEQ ID NO: 156052 - protein, 10 aa, synthetic construct
QQERGDFNNT

SEQ ID NO: 156053 - protein, 10 aa, synthetic construct
QQNRGDFNNT

SEQ ID NO: 156054 - protein, 10 aa, synthetic construct
QQQRGDFNNT

SEQ ID NO: 156055 - protein, 10 aa, synthetic construct
QQSRGDFNNT

SEQ ID NO: 156056 - protein, 10 aa, synthetic construct
QQTRGDFNNT

SEQ ID NO: 156057 - protein, 10 aa, synthetic construct
QQFRGDFNNT

SEQ ID NO: 156058 - protein, 10 aa, synthetic construct
QQGRGDFNNT

SEQ ID NO: 156059 - protein, 10 aa, synthetic construct
QQHRGDFNNT

SEQ ID NO: 156060 - protein, 10 aa, synthetic construct
QQIRGDFNNT

SEQ ID NO: 156061 - protein, 10 aa, synthetic construct
QQKRGDFNNT

SEQ ID NO: 156062 - protein, 10 aa, synthetic construct
QQLRGDFNNT

SEQ ID NO: 156063 - protein, 10 aa, synthetic construct
QQMRGDFNNT

SEQ ID NO: 156064 - protein, 10 aa, synthetic construct
QQPRGDFNNT

SEQ ID NO: 156065 - protein, 10 aa, synthetic construct
QQRRGDFNNT

SEQ ID NO: 156066 - protein, 10 aa, synthetic construct
QQVRGDFNNT

SEQ ID NO: 156067 - protein, 10 aa, synthetic construct
QQWRGDFNNT

SEQ ID NO: 156068 - protein, 10 aa, synthetic construct
QQYRGDFNNT

SEQ ID NO: 156069 - protein, 10 aa, synthetic construct
QSARGDFNNT

SEQ ID NO: 156070 - protein, 10 aa, synthetic construct
QSDRGDFNNT

SEQ ID NO: 156071 - protein, 10 aa, synthetic construct
QSERGDFNNT

SEQ ID NO: 156072 - protein, 10 aa, synthetic construct
QSNRGDFNNT

SEQ ID NO: 156073 - protein, 10 aa, synthetic construct
QSQRGDFNNT

SEQ ID NO: 156074 - protein, 10 aa, synthetic construct
QSSRGDFNNT

SEQ ID NO: 156075 - protein, 10 aa, synthetic construct
QSTRGDFNNT

SEQ ID NO: 156076 - protein, 10 aa, synthetic construct
QSFRGDFNNT

SEQ ID NO: 156077 - protein, 10 aa, synthetic construct
QSGRGDFNNT

SEQ ID NO: 156078 - protein, 10 aa, synthetic construct
QSHRGDFNNT

SEQ ID NO: 156079 - protein, 10 aa, synthetic construct
QSIRGDFNNT

SEQ ID NO: 156080 - protein, 10 aa, synthetic construct
QSKRGDFNNT

SEQ ID NO: 156081 - protein, 10 aa, synthetic construct
QSLRGDFNNT

SEQ ID NO: 156082 - protein, 10 aa, synthetic construct
QSMRGDFNNT

SEQ ID NO: 156083 - protein, 10 aa, synthetic construct
QSPRGDFNNT

SEQ ID NO: 156084 - protein, 10 aa, synthetic construct
QSRRGDFNNT

SEQ ID NO: 156085 - protein, 10 aa, synthetic construct
QSVRGDFNNT

SEQ ID NO: 156086 - protein, 10 aa, synthetic construct
QSWRGDFNNT

SEQ ID NO: 156087 - protein, 10 aa, synthetic construct
QSYRGDFNNT

SEQ ID NO: 156088 - protein, 10 aa, synthetic construct
QTARGDFNNT

SEQ ID NO: 156089 - protein, 10 aa, synthetic construct
QTDRGDFNNT

SEQ ID NO: 156090 - protein, 10 aa, synthetic construct
QTERGDFNNT

SEQ ID NO: 156091 - protein, 10 aa, synthetic construct
QTNRGDFNNT

SEQ ID NO: 156092 - protein, 10 aa, synthetic construct
QTQRGDFNNT

SEQ ID NO: 156093 - protein, 10 aa, synthetic construct
QTSRGDFNNT

SEQ ID NO: 156094 - protein, 10 aa, synthetic construct
QTTRGDFNNT

SEQ ID NO: 156095 - protein, 10 aa, synthetic construct
QTFRGDFNNT

SEQ ID NO: 156096 - protein, 10 aa, synthetic construct
QTGRGDFNNT

SEQ ID NO: 156097 - protein, 10 aa, synthetic construct
QTHRGDFNNT

SEQ ID NO: 156098 - protein, 10 aa, synthetic construct
QTIRGDFNNT

SEQ ID NO: 156099 - protein, 10 aa, synthetic construct
QTKRGDFNNT

SEQ ID NO: 156100 - protein, 10 aa, synthetic construct
QTLRGDFNNT

SEQ ID NO: 156101 - protein, 10 aa, synthetic construct
QTMRGDFNNT

SEQ ID NO: 156102 - protein, 10 aa, synthetic construct
QTPRGDFNNT

SEQ ID NO: 156103 - protein, 10 aa, synthetic construct
QTRRGDFNNT

SEQ ID NO: 156104 - protein, 10 aa, synthetic construct
QTVRGDFNNT

SEQ ID NO: 156105 - protein, 10 aa, synthetic construct
QTWRGDFNNT

SEQ ID NO: 156106 - protein, 10 aa, synthetic construct
QTYRGDFNNT

SEQ ID NO: 156107 - protein, 10 aa, synthetic construct
QFARGDFNNT

SEQ ID NO: 156108 - protein, 10 aa, synthetic construct
QFDRGDFNNT

SEQ ID NO: 156109 - protein, 10 aa, synthetic construct
QFERGDFNNT

SEQ ID NO: 156110 - protein, 10 aa, synthetic construct
QFNRGDFNNT

SEQ ID NO: 156111 - protein, 10 aa, synthetic construct
QFQRGDFNNT

SEQ ID NO: 156112 - protein, 10 aa, synthetic construct
QFSRGDFNNT

SEQ ID NO: 156113 - protein, 10 aa, synthetic construct
QFTRGDFNNT

SEQ ID NO: 156114 - protein, 10 aa, synthetic construct
QFFRGDFNNT

SEQ ID NO: 156115 - protein, 10 aa, synthetic construct
QFGRGDFNNT

SEQ ID NO: 156116 - protein, 10 aa, synthetic construct
QFHRGDFNNT

SEQ ID NO: 156117 - protein, 10 aa, synthetic construct
QFIRGDFNNT

SEQ ID NO: 156118 - protein, 10 aa, synthetic construct
QFKRGDFNNT

SEQ ID NO: 156119 - protein, 10 aa, synthetic construct
QFLRGDFNNT

SEQ ID NO: 156120 - protein, 10 aa, synthetic construct
QFMRGDFNNT

SEQ ID NO: 156121 - protein, 10 aa, synthetic construct
QFPRGDFNNT

SEQ ID NO: 156122 - protein, 10 aa, synthetic construct
QFRRGDFNNT

SEQ ID NO: 156123 - protein, 10 aa, synthetic construct
QFVRGDFNNT

SEQ ID NO: 156124 - protein, 10 aa, synthetic construct
QFWRGDFNNT

SEQ ID NO: 156125 - protein, 10 aa, synthetic construct
QFYRGDFNNT

SEQ ID NO: 156126 - protein, 10 aa, synthetic construct
QGARGDFNNT

SEQ ID NO: 156127 - protein, 10 aa, synthetic construct
QGDRGDFNNT

SEQ ID NO: 156128 - protein, 10 aa, synthetic construct
QGERGDFNNT

SEQ ID NO: 156129 - protein, 10 aa, synthetic construct
QGNRGDFNNT

SEQ ID NO: 156130 - protein, 10 aa, synthetic construct
QGQRGDFNNT

SEQ ID NO: 156131 - protein, 10 aa, synthetic construct
QGSRGDFNNT

SEQ ID NO: 156132 - protein, 10 aa, synthetic construct
QGTRGDFNNT

SEQ ID NO: 156133 - protein, 10 aa, synthetic construct
QGFRGDFNNT

SEQ ID NO: 156134 - protein, 10 aa, synthetic construct
QGGRGDFNNT

SEQ ID NO: 156135 - protein, 10 aa, synthetic construct
QGHRGDFNNT

SEQ ID NO: 156136 - protein, 10 aa, synthetic construct
QGIRGDFNNT

SEQ ID NO: 156137 - protein, 10 aa, synthetic construct
QGKRGDFNNT

SEQ ID NO: 156138 - protein, 10 aa, synthetic construct
QGLRGDFNNT

SEQ ID NO: 156139 - protein, 10 aa, synthetic construct
QGMRGDFNNT

SEQ ID NO: 156140 - protein, 10 aa, synthetic construct
QGPRGDFNNT

SEQ ID NO: 156141 - protein, 10 aa, synthetic construct
QGRRGDFNNT

SEQ ID NO: 156142 - protein, 10 aa, synthetic construct
QGVRGDFNNT

SEQ ID NO: 156143 - protein, 10 aa, synthetic construct
QGWRGDFNNT

SEQ ID NO: 156144 - protein, 10 aa, synthetic construct
QGYRGDFNNT

SEQ ID NO: 156145 - protein, 10 aa, synthetic construct
QHARGDFNNT

SEQ ID NO: 156146 - protein, 10 aa, synthetic construct
QHDRGDFNNT

SEQ ID NO: 156147 - protein, 10 aa, synthetic construct
QHERGDFNNT

SEQ ID NO: 156148 - protein, 10 aa, synthetic construct
QHNRGDFNNT

SEQ ID NO: 156149 - protein, 10 aa, synthetic construct
QHQRGDFNNT

SEQ ID NO: 156150 - protein, 10 aa, synthetic construct
QHSRGDFNNT

SEQ ID NO: 156151 - protein, 10 aa, synthetic construct
QHTRGDFNNT

SEQ ID NO: 156152 - protein, 10 aa, synthetic construct
QHFRGDFNNT

SEQ ID NO: 156153 - protein, 10 aa, synthetic construct
QHGRGDFNNT

SEQ ID NO: 156154 - protein, 10 aa, synthetic construct
QHHRGDFNNT

SEQ ID NO: 156155 - protein, 10 aa, synthetic construct
QHIRGDFNNT

SEQ ID NO: 156156 - protein, 10 aa, synthetic construct
QHKRGDFNNT

SEQ ID NO: 156157 - protein, 10 aa, synthetic construct
QHLRGDFNNT

SEQ ID NO: 156158 - protein, 10 aa, synthetic construct
QHMRGDFNNT

SEQ ID NO: 156159 - protein, 10 aa, synthetic construct
QHPRGDFNNT

SEQ ID NO: 156160 - protein, 10 aa, synthetic construct
QHRRGDFNNT

SEQ ID NO: 156161 - protein, 10 aa, synthetic construct
QHVRGDFNNT

SEQ ID NO: 156162 - protein, 10 aa, synthetic construct
QHWRGDFNNT

SEQ ID NO: 156163 - protein, 10 aa, synthetic construct
QHYRGDFNNT

SEQ ID NO: 156164 - protein, 10 aa, synthetic construct
QIARGDFNNT

SEQ ID NO: 156165 - protein, 10 aa, synthetic construct
QIDRGDFNNT

SEQ ID NO: 156166 - protein, 10 aa, synthetic construct
QIERGDFNNT

SEQ ID NO: 156167 - protein, 10 aa, synthetic construct
QINRGDFNNT

SEQ ID NO: 156168 - protein, 10 aa, synthetic construct
QIQRGDFNNT

SEQ ID NO: 156169 - protein, 10 aa, synthetic construct
QISRGDFNNT

SEQ ID NO: 156170 - protein, 10 aa, synthetic construct
QITRGDFNNT

SEQ ID NO: 156171 - protein, 10 aa, synthetic construct
QIFRGDFNNT

SEQ ID NO: 156172 - protein, 10 aa, synthetic construct
QIGRGDFNNT

SEQ ID NO: 156173 - protein, 10 aa, synthetic construct
QIHRGDFNNT

SEQ ID NO: 156174 - protein, 10 aa, synthetic construct
QIIRGDFNNT

SEQ ID NO: 156175 - protein, 10 aa, synthetic construct
QIKRGDFNNT

SEQ ID NO: 156176 - protein, 10 aa, synthetic construct
QILRGDFNNT

SEQ ID NO: 156177 - protein, 10 aa, synthetic construct
QIMRGDFNNT

SEQ ID NO: 156178 - protein, 10 aa, synthetic construct
QIPRGDFNNT

SEQ ID NO: 156179 - protein, 10 aa, synthetic construct
QIRRGDFNNT

SEQ ID NO: 156180 - protein, 10 aa, synthetic construct
QIVRGDFNNT

SEQ ID NO: 156181 - protein, 10 aa, synthetic construct
QIWRGDFNNT

SEQ ID NO: 156182 - protein, 10 aa, synthetic construct
QIYRGDFNNT

SEQ ID NO: 156183 - protein, 10 aa, synthetic construct
QKARGDFNNT

SEQ ID NO: 156184 - protein, 10 aa, synthetic construct
QKDRGDFNNT

SEQ ID NO: 156185 - protein, 10 aa, synthetic construct
QKERGDFNNT

SEQ ID NO: 156186 - protein, 10 aa, synthetic construct
QKNRGDFNNT

SEQ ID NO: 156187 - protein, 10 aa, synthetic construct
QKQRGDFNNT

SEQ ID NO: 156188 - protein, 10 aa, synthetic construct
QKSRGDFNNT

SEQ ID NO: 156189 - protein, 10 aa, synthetic construct
QKTRGDFNNT

SEQ ID NO: 156190 - protein, 10 aa, synthetic construct
QKFRGDFNNT

SEQ ID NO: 156191 - protein, 10 aa, synthetic construct
QKGRGDFNNT

SEQ ID NO: 156192 - protein, 10 aa, synthetic construct
QKHRGDFNNT

SEQ ID NO: 156193 - protein, 10 aa, synthetic construct
QKIRGDFNNT

SEQ ID NO: 156194 - protein, 10 aa, synthetic construct
QKKRGDFNNT

SEQ ID NO: 156195 - protein, 10 aa, synthetic construct
QKLRGDFNNT

SEQ ID NO: 156196 - protein, 10 aa, synthetic construct
QKMRGDFNNT

SEQ ID NO: 156197 - protein, 10 aa, synthetic construct
QKPRGDFNNT

SEQ ID NO: 156198 - protein, 10 aa, synthetic construct
QKRRGDFNNT

SEQ ID NO: 156199 - protein, 10 aa, synthetic construct
QKVRGDFNNT

SEQ ID NO: 156200 - protein, 10 aa, synthetic construct
QKWRGDFNNT

SEQ ID NO: 156201 - protein, 10 aa, synthetic construct
QKYRGDFNNT

SEQ ID NO: 156202 - protein, 10 aa, synthetic construct
QLARGDFNNT

SEQ ID NO: 156203 - protein, 10 aa, synthetic construct
QLDRGDFNNT

SEQ ID NO: 156204 - protein, 10 aa, synthetic construct
QLERGDFNNT

SEQ ID NO: 156205 - protein, 10 aa, synthetic construct
QLNRGDFNNT

SEQ ID NO: 156206 - protein, 10 aa, synthetic construct
QLQRGDFNNT

SEQ ID NO: 156207 - protein, 10 aa, synthetic construct
QLSRGDFNNT

SEQ ID NO: 156208 - protein, 10 aa, synthetic construct
QLTRGDFNNT

SEQ ID NO: 156209 - protein, 10 aa, synthetic construct
QLFRGDFNNT

SEQ ID NO: 156210 - protein, 10 aa, synthetic construct
QLGRGDFNNT

SEQ ID NO: 156211 - protein, 10 aa, synthetic construct
QLHRGDFNNT

SEQ ID NO: 156212 - protein, 10 aa, synthetic construct
QLIRGDFNNT

SEQ ID NO: 156213 - protein, 10 aa, synthetic construct
QLKRGDFNNT

SEQ ID NO: 156214 - protein, 10 aa, synthetic construct
QLLRGDFNNT

SEQ ID NO: 156215 - protein, 10 aa, synthetic construct
QLMRGDFNNT

SEQ ID NO: 156216 - protein, 10 aa, synthetic construct
QLPRGDFNNT

SEQ ID NO: 156217 - protein, 10 aa, synthetic construct
QLRRGDFNNT

SEQ ID NO: 156218 - protein, 10 aa, synthetic construct
QLVRGDFNNT

SEQ ID NO: 156219 - protein, 10 aa, synthetic construct
QLWRGDFNNT

SEQ ID NO: 156220 - protein, 10 aa, synthetic construct
QLYRGDFNNT

SEQ ID NO: 156221 - protein, 10 aa, synthetic construct
QMARGDFNNT

SEQ ID NO: 156222 - protein, 10 aa, synthetic construct
QMDRGDFNNT

SEQ ID NO: 156223 - protein, 10 aa, synthetic construct
QMERGDFNNT

SEQ ID NO: 156224 - protein, 10 aa, synthetic construct
QMNRGDFNNT

SEQ ID NO: 156225 - protein, 10 aa, synthetic construct
QMQRGDFNNT

SEQ ID NO: 156226 - protein, 10 aa, synthetic construct
QMSRGDFNNT

SEQ ID NO: 156227 - protein, 10 aa, synthetic construct
QMTRGDFNNT

SEQ ID NO: 156228 - protein, 10 aa, synthetic construct
QMFRGDFNNT

SEQ ID NO: 156229 - protein, 10 aa, synthetic construct
QMGRGDFNNT

SEQ ID NO: 156230 - protein, 10 aa, synthetic construct
QMHRGDFNNT

SEQ ID NO: 156231 - protein, 10 aa, synthetic construct
QMIRGDFNNT

SEQ ID NO: 156232 - protein, 10 aa, synthetic construct
QMKRGDFNNT

SEQ ID NO: 156233 - protein, 10 aa, synthetic construct
QMLRGDFNNT

SEQ ID NO: 156234 - protein, 10 aa, synthetic construct
QMMRGDFNNT

SEQ ID NO: 156235 - protein, 10 aa, synthetic construct
QMPRGDFNNT

SEQ ID NO: 156236 - protein, 10 aa, synthetic construct
QMRRGDFNNT

SEQ ID NO: 156237 - protein, 10 aa, synthetic construct
QMVRGDFNNT

SEQ ID NO: 156238 - protein, 10 aa, synthetic construct
QMWRGDFNNT

SEQ ID NO: 156239 - protein, 10 aa, synthetic construct
QMYRGDFNNT

SEQ ID NO: 156240 - protein, 10 aa, synthetic construct
QPARGDFNNT

SEQ ID NO: 156241 - protein, 10 aa, synthetic construct
QPDRGDFNNT

SEQ ID NO: 156242 - protein, 10 aa, synthetic construct
QPERGDFNNT

SEQ ID NO: 156243 - protein, 10 aa, synthetic construct
QPNRGDFNNT

SEQ ID NO: 156244 - protein, 10 aa, synthetic construct
QPQRGDFNNT

SEQ ID NO: 156245 - protein, 10 aa, synthetic construct
QPSRGDFNNT

SEQ ID NO: 156246 - protein, 10 aa, synthetic construct
QPTRGDFNNT

SEQ ID NO: 156247 - protein, 10 aa, synthetic construct
QPFRGDFNNT

SEQ ID NO: 156248 - protein, 10 aa, synthetic construct
QPGRGDFNNT

SEQ ID NO: 156249 - protein, 10 aa, synthetic construct
QPHRGDFNNT

SEQ ID NO: 156250 - protein, 10 aa, synthetic construct
QPIRGDFNNT

SEQ ID NO: 156251 - protein, 10 aa, synthetic construct
QPKRGDFNNT

SEQ ID NO: 156252 - protein, 10 aa, synthetic construct
QPLRGDFNNT

SEQ ID NO: 156253 - protein, 10 aa, synthetic construct
QPMRGDFNNT

SEQ ID NO: 156254 - protein, 10 aa, synthetic construct
QPPRGDFNNT

SEQ ID NO: 156255 - protein, 10 aa, synthetic construct
QPRRGDFNNT

SEQ ID NO: 156256 - protein, 10 aa, synthetic construct
QPVRGDFNNT

SEQ ID NO: 156257 - protein, 10 aa, synthetic construct
QPWRGDFNNT

SEQ ID NO: 156258 - protein, 10 aa, synthetic construct
QPYRGDFNNT

SEQ ID NO: 156259 - protein, 10 aa, synthetic construct
QRARGDFNNT

SEQ ID NO: 156260 - protein, 10 aa, synthetic construct
QRDRGDFNNT

SEQ ID NO: 156261 - protein, 10 aa, synthetic construct
QRERGDFNNT

SEQ ID NO: 156262 - protein, 10 aa, synthetic construct
QRNRGDFNNT

SEQ ID NO: 156263 - protein, 10 aa, synthetic construct
QRQRGDFNNT

SEQ ID NO: 156264 - protein, 10 aa, synthetic construct
QRSRGDFNNT

SEQ ID NO: 156265 - protein, 10 aa, synthetic construct
QRTRGDFNNT

SEQ ID NO: 156266 - protein, 10 aa, synthetic construct
QRFRGDFNNT

SEQ ID NO: 156267 - protein, 10 aa, synthetic construct
QRGRGDFNNT

SEQ ID NO: 156268 - protein, 10 aa, synthetic construct
QRHRGDFNNT

SEQ ID NO: 156269 - protein, 10 aa, synthetic construct
QRIRGDFNNT

SEQ ID NO: 156270 - protein, 10 aa, synthetic construct
QRKRGDFNNT

SEQ ID NO: 156271 - protein, 10 aa, synthetic construct
QRLRGDFNNT

SEQ ID NO: 156272 - protein, 10 aa, synthetic construct
QRMRGDFNNT

SEQ ID NO: 156273 - protein, 10 aa, synthetic construct
QRPRGDFNNT

SEQ ID NO: 156274 - protein, 10 aa, synthetic construct
QRRRGDFNNT

SEQ ID NO: 156275 - protein, 10 aa, synthetic construct
QRVRGDFNNT

SEQ ID NO: 156276 - protein, 10 aa, synthetic construct
QRWRGDFNNT

SEQ ID NO: 156277 - protein, 10 aa, synthetic construct
QRYRGDFNNT

SEQ ID NO: 156278 - protein, 10 aa, synthetic construct
QVARGDFNNT

SEQ ID NO: 156279 - protein, 10 aa, synthetic construct
QVDRGDFNNT

SEQ ID NO: 156280 - protein, 10 aa, synthetic construct
QVERGDFNNT

SEQ ID NO: 156281 - protein, 10 aa, synthetic construct
QVNRGDFNNT

SEQ ID NO: 156282 - protein, 10 aa, synthetic construct
QVQRGDFNNT

SEQ ID NO: 156283 - protein, 10 aa, synthetic construct
QVSRGDFNNT

SEQ ID NO: 156284 - protein, 10 aa, synthetic construct
QVTRGDFNNT

SEQ ID NO: 156285 - protein, 10 aa, synthetic construct
QVFRGDFNNT

SEQ ID NO: 156286 - protein, 10 aa, synthetic construct
QVGRGDFNNT

SEQ ID NO: 156287 - protein, 10 aa, synthetic construct
QVHRGDFNNT

SEQ ID NO: 156288 - protein, 10 aa, synthetic construct
QVIRGDFNNT

SEQ ID NO: 156289 - protein, 10 aa, synthetic construct
QVKRGDFNNT

SEQ ID NO: 156290 - protein, 10 aa, synthetic construct
QVLRGDFNNT

SEQ ID NO: 156291 - protein, 10 aa, synthetic construct
QVMRGDFNNT

SEQ ID NO: 156292 - protein, 10 aa, synthetic construct
QVPRGDFNNT

SEQ ID NO: 156293 - protein, 10 aa, synthetic construct
QVRRGDFNNT

SEQ ID NO: 156294 - protein, 10 aa, synthetic construct
QVVRGDFNNT

SEQ ID NO: 156295 - protein, 10 aa, synthetic construct
QVWRGDFNNT

SEQ ID NO: 156296 - protein, 10 aa, synthetic construct
QVYRGDFNNT

SEQ ID NO: 156297 - protein, 10 aa, synthetic construct
QWARGDFNNT

SEQ ID NO: 156298 - protein, 10 aa, synthetic construct
QWDRGDFNNT

SEQ ID NO: 156299 - protein, 10 aa, synthetic construct
QWERGDFNNT

SEQ ID NO: 156300 - protein, 10 aa, synthetic construct
QWNRGDFNNT

SEQ ID NO: 156301 - protein, 10 aa, synthetic construct
QWQRGDFNNT

SEQ ID NO: 156302 - protein, 10 aa, synthetic construct
QWSRGDFNNT

SEQ ID NO: 156303 - protein, 10 aa, synthetic construct
QWTRGDFNNT

SEQ ID NO: 156304 - protein, 10 aa, synthetic construct
QWFRGDFNNT

SEQ ID NO: 156305 - protein, 10 aa, synthetic construct
QWGRGDFNNT

SEQ ID NO: 156306 - protein, 10 aa, synthetic construct
QWHRGDFNNT

SEQ ID NO: 156307 - protein, 10 aa, synthetic construct
QWIRGDFNNT

SEQ ID NO: 156308 - protein, 10 aa, synthetic construct
QWKRGDFNNT

SEQ ID NO: 156309 - protein, 10 aa, synthetic construct
QWLRGDFNNT

SEQ ID NO: 156310 - protein, 10 aa, synthetic construct
QWMRGDFNNT

SEQ ID NO: 156311 - protein, 10 aa, synthetic construct
QWPRGDFNNT

SEQ ID NO: 156312 - protein, 10 aa, synthetic construct
QWRRGDFNNT

SEQ ID NO: 156313 - protein, 10 aa, synthetic construct
QWVRGDFNNT

SEQ ID NO: 156314 - protein, 10 aa, synthetic construct
QWWRGDFNNT

SEQ ID NO: 156315 - protein, 10 aa, synthetic construct
QWYRGDFNNT

SEQ ID NO: 156316 - protein, 10 aa, synthetic construct
QYARGDFNNT

SEQ ID NO: 156317 - protein, 10 aa, synthetic construct
QYDRGDFNNT

SEQ ID NO: 156318 - protein, 10 aa, synthetic construct
QYERGDFNNT

SEQ ID NO: 156319 - protein, 10 aa, synthetic construct
QYNRGDFNNT

SEQ ID NO: 156320 - protein, 10 aa, synthetic construct
QYQRGDFNNT

SEQ ID NO: 156321 - protein, 10 aa, synthetic construct
QYSRGDFNNT

SEQ ID NO: 156322 - protein, 10 aa, synthetic construct
QYTRGDFNNT

SEQ ID NO: 156323 - protein, 10 aa, synthetic construct
QYFRGDFNNT

SEQ ID NO: 156324 - protein, 10 aa, synthetic construct
QYGRGDFNNT

SEQ ID NO: 156325 - protein, 10 aa, synthetic construct
QYHRGDFNNT

SEQ ID NO: 156326 - protein, 10 aa, synthetic construct
QYIRGDFNNT

SEQ ID NO: 156327 - protein, 10 aa, synthetic construct
QYKRGDFNNT

SEQ ID NO: 156328 - protein, 10 aa, synthetic construct
QYLRGDFNNT

SEQ ID NO: 156329 - protein, 10 aa, synthetic construct
QYMRGDFNNT

SEQ ID NO: 156330 - protein, 10 aa, synthetic construct
QYPRGDFNNT

SEQ ID NO: 156331 - protein, 10 aa, synthetic construct
QYRRGDFNNT

SEQ ID NO: 156332 - protein, 10 aa, synthetic construct
QYVRGDFNNT

SEQ ID NO: 156333 - protein, 10 aa, synthetic construct
QYWRGDFNNT

SEQ ID NO: 156334 - protein, 10 aa, synthetic construct
QYYRGDFNNT

SEQ ID NO: 156335 - protein, 10 aa, synthetic construct
SAARGDFNNT

SEQ ID NO: 156336 - protein, 10 aa, synthetic construct
SADRGDFNNT

SEQ ID NO: 156337 - protein, 10 aa, synthetic construct
SAERGDFNNT

SEQ ID NO: 156338 - protein, 10 aa, synthetic construct
SANRGDFNNT

SEQ ID NO: 156339 - protein, 10 aa, synthetic construct
SAQRGDFNNT

SEQ ID NO: 156340 - protein, 10 aa, synthetic construct
SASRGDFNNT

SEQ ID NO: 156341 - protein, 10 aa, synthetic construct
SATRGDFNNT

SEQ ID NO: 156342 - protein, 10 aa, synthetic construct
SAFRGDFNNT

SEQ ID NO: 156343 - protein, 10 aa, synthetic construct
SAGRGDFNNT

SEQ ID NO: 156344 - protein, 10 aa, synthetic construct
SAHRGDFNNT

SEQ ID NO: 156345 - protein, 10 aa, synthetic construct
SAIRGDFNNT

SEQ ID NO: 156346 - protein, 10 aa, synthetic construct
SAKRGDFNNT

SEQ ID NO: 156347 - protein, 10 aa, synthetic construct
SALRGDFNNT

SEQ ID NO: 156348 - protein, 10 aa, synthetic construct
SAMRGDFNNT

SEQ ID NO: 156349 - protein, 10 aa, synthetic construct
SAPRGDFNNT

SEQ ID NO: 156350 - protein, 10 aa, synthetic construct
SARRGDFNNT

SEQ ID NO: 156351 - protein, 10 aa, synthetic construct
SAVRGDFNNT

SEQ ID NO: 156352 - protein, 10 aa, synthetic construct
SAWRGDFNNT

SEQ ID NO: 156353 - protein, 10 aa, synthetic construct
SAYRGDFNNT

SEQ ID NO: 156354 - protein, 10 aa, synthetic construct
SDARGDFNNT

SEQ ID NO: 156355 - protein, 10 aa, synthetic construct
SDDRGDFNNT

SEQ ID NO: 156356 - protein, 10 aa, synthetic construct
SDERGDFNNT

SEQ ID NO: 156357 - protein, 10 aa, synthetic construct
SDNRGDFNNT

SEQ ID NO: 156358 - protein, 10 aa, synthetic construct
SDQRGDFNNT

SEQ ID NO: 156359 - protein, 10 aa, synthetic construct
SDSRGDFNNT

SEQ ID NO: 156360 - protein, 10 aa, synthetic construct
SDTRGDFNNT

SEQ ID NO: 156361 - protein, 10 aa, synthetic construct
SDFRGDFNNT

SEQ ID NO: 156362 - protein, 10 aa, synthetic construct
SDGRGDFNNT

SEQ ID NO: 156363 - protein, 10 aa, synthetic construct
SDHRGDFNNT

SEQ ID NO: 156364 - protein, 10 aa, synthetic construct
SDIRGDFNNT

SEQ ID NO: 156365 - protein, 10 aa, synthetic construct
SDKRGDFNNT

SEQ ID NO: 156366 - protein, 10 aa, synthetic construct
SDLRGDFNNT

SEQ ID NO: 156367 - protein, 10 aa, synthetic construct
SDMRGDFNNT

SEQ ID NO: 156368 - protein, 10 aa, synthetic construct
SDPRGDFNNT

SEQ ID NO: 156369 - protein, 10 aa, synthetic construct
SDRRGDFNNT

SEQ ID NO: 156370 - protein, 10 aa, synthetic construct
SDVRGDFNNT

SEQ ID NO: 156371 - protein, 10 aa, synthetic construct
SDWRGDFNNT

SEQ ID NO: 156372 - protein, 10 aa, synthetic construct
SDYRGDFNNT

SEQ ID NO: 156373 - protein, 10 aa, synthetic construct
SEARGDFNNT

SEQ ID NO: 156374 - protein, 10 aa, synthetic construct
SEDRGDFNNT

SEQ ID NO: 156375 - protein, 10 aa, synthetic construct
SEERGDFNNT

SEQ ID NO: 156376 - protein, 10 aa, synthetic construct
SENRGDFNNT

SEQ ID NO: 156377 - protein, 10 aa, synthetic construct
SEQRGDFNNT

SEQ ID NO: 156378 - protein, 10 aa, synthetic construct
SESRGDFNNT

SEQ ID NO: 156379 - protein, 10 aa, synthetic construct
SETRGDFNNT

SEQ ID NO: 156380 - protein, 10 aa, synthetic construct
SEFRGDFNNT

SEQ ID NO: 156381 - protein, 10 aa, synthetic construct
SEGRGDFNNT

SEQ ID NO: 156382 - protein, 10 aa, synthetic construct
SEHRGDFNNT

SEQ ID NO: 156383 - protein, 10 aa, synthetic construct
SEIRGDFNNT

SEQ ID NO: 156384 - protein, 10 aa, synthetic construct
SEKRGDFNNT

SEQ ID NO: 156385 - protein, 10 aa, synthetic construct
SELRGDFNNT

SEQ ID NO: 156386 - protein, 10 aa, synthetic construct
SEMRGDFNNT

SEQ ID NO: 156387 - protein, 10 aa, synthetic construct
SEPRGDFNNT

SEQ ID NO: 156388 - protein, 10 aa, synthetic construct
SERRGDFNNT

SEQ ID NO: 156389 - protein, 10 aa, synthetic construct
SEVRGDFNNT

SEQ ID NO: 156390 - protein, 10 aa, synthetic construct
SEWRGDFNNT

SEQ ID NO: 156391 - protein, 10 aa, synthetic construct
SEYRGDFNNT

SEQ ID NO: 156392 - protein, 10 aa, synthetic construct
SNARGDFNNT

SEQ ID NO: 156393 - protein, 10 aa, synthetic construct
SNDRGDFNNT

SEQ ID NO: 156394 - protein, 10 aa, synthetic construct
SNERGDFNNT

SEQ ID NO: 156395 - protein, 10 aa, synthetic construct
SNNRGDFNNT

SEQ ID NO: 156396 - protein, 10 aa, synthetic construct
SNQRGDFNNT

SEQ ID NO: 156397 - protein, 10 aa, synthetic construct
SNSRGDFNNT

SEQ ID NO: 156398 - protein, 10 aa, synthetic construct
SNTRGDFNNT

SEQ ID NO: 156399 - protein, 10 aa, synthetic construct
SNFRGDFNNT

SEQ ID NO: 156400 - protein, 10 aa, synthetic construct
SNGRGDFNNT

SEQ ID NO: 156401 - protein, 10 aa, synthetic construct
SNHRGDFNNT

SEQ ID NO: 156402 - protein, 10 aa, synthetic construct
SNIRGDFNNT

SEQ ID NO: 156403 - protein, 10 aa, synthetic construct
SNKRGDFNNT

SEQ ID NO: 156404 - protein, 10 aa, synthetic construct
SNLRGDFNNT

SEQ ID NO: 156405 - protein, 10 aa, synthetic construct
SNMRGDFNNT

SEQ ID NO: 156406 - protein, 10 aa, synthetic construct
SNPRGDFNNT

SEQ ID NO: 156407 - protein, 10 aa, synthetic construct
SNRRGDFNNT

SEQ ID NO: 156408 - protein, 10 aa, synthetic construct
SNVRGDFNNT

SEQ ID NO: 156409 - protein, 10 aa, synthetic construct
SNWRGDFNNT

SEQ ID NO: 156410 - protein, 10 aa, synthetic construct
SNYRGDFNNT

SEQ ID NO: 156411 - protein, 10 aa, synthetic construct
SQARGDFNNT

SEQ ID NO: 156412 - protein, 10 aa, synthetic construct
SQDRGDFNNT

SEQ ID NO: 156413 - protein, 10 aa, synthetic construct
SQERGDFNNT

SEQ ID NO: 156414 - protein, 10 aa, synthetic construct
SQNRGDFNNT

SEQ ID NO: 156415 - protein, 10 aa, synthetic construct
SQQRGDFNNT

SEQ ID NO: 156416 - protein, 10 aa, synthetic construct
SQSRGDFNNT

SEQ ID NO: 156417 - protein, 10 aa, synthetic construct
SQTRGDFNNT

SEQ ID NO: 156418 - protein, 10 aa, synthetic construct
SQFRGDFNNT

SEQ ID NO: 156419 - protein, 10 aa, synthetic construct
SQGRGDFNNT

SEQ ID NO: 156420 - protein, 10 aa, synthetic construct
SQHRGDFNNT

SEQ ID NO: 156421 - protein, 10 aa, synthetic construct
SQIRGDFNNT

SEQ ID NO: 156422 - protein, 10 aa, synthetic construct
SQKRGDFNNT

SEQ ID NO: 156423 - protein, 10 aa, synthetic construct
SQLRGDFNNT

SEQ ID NO: 156424 - protein, 10 aa, synthetic construct
SQMRGDFNNT

SEQ ID NO: 156425 - protein, 10 aa, synthetic construct
SQPRGDFNNT

SEQ ID NO: 156426 - protein, 10 aa, synthetic construct
SQRRGDFNNT

SEQ ID NO: 156427 - protein, 10 aa, synthetic construct
SQVRGDFNNT

SEQ ID NO: 156428 - protein, 10 aa, synthetic construct
SQWRGDFNNT

SEQ ID NO: 156429 - protein, 10 aa, synthetic construct
SQYRGDFNNT

SEQ ID NO: 156430 - protein, 10 aa, synthetic construct
SSARGDFNNT

SEQ ID NO: 156431 - protein, 10 aa, synthetic construct
SSDRGDFNNT

SEQ ID NO: 156432 - protein, 10 aa, synthetic construct
SSERGDFNNT

SEQ ID NO: 156433 - protein, 10 aa, synthetic construct
SSNRGDFNNT

SEQ ID NO: 156434 - protein, 10 aa, synthetic construct
SSQRGDFNNT

SEQ ID NO: 156435 - protein, 10 aa, synthetic construct
SSSRGDFNNT

SEQ ID NO: 156436 - protein, 10 aa, synthetic construct
SSTRGDFNNT

SEQ ID NO: 156437 - protein, 10 aa, synthetic construct
SSFRGDFNNT

SEQ ID NO: 156438 - protein, 10 aa, synthetic construct
SSGRGDFNNT

SEQ ID NO: 156439 - protein, 10 aa, synthetic construct
SSHRGDFNNT

SEQ ID NO: 156440 - protein, 10 aa, synthetic construct
SSIRGDFNNT

SEQ ID NO: 156441 - protein, 10 aa, synthetic construct
SSKRGDFNNT

SEQ ID NO: 156442 - protein, 10 aa, synthetic construct
SSLRGDFNNT

SEQ ID NO: 156443 - protein, 10 aa, synthetic construct
SSMRGDFNNT

SEQ ID NO: 156444 - protein, 10 aa, synthetic construct
SSPRGDFNNT

SEQ ID NO: 156445 - protein, 10 aa, synthetic construct
SSRRGDFNNT

SEQ ID NO: 156446 - protein, 10 aa, synthetic construct
SSVRGDFNNT

SEQ ID NO: 156447 - protein, 10 aa, synthetic construct
SSWRGDFNNT

SEQ ID NO: 156448 - protein, 10 aa, synthetic construct
SSYRGDFNNT

SEQ ID NO: 156449 - protein, 10 aa, synthetic construct
STARGDFNNT

SEQ ID NO: 156450 - protein, 10 aa, synthetic construct
STDRGDFNNT

SEQ ID NO: 156451 - protein, 10 aa, synthetic construct
STERGDFNNT

SEQ ID NO: 156452 - protein, 10 aa, synthetic construct
STNRGDFNNT

SEQ ID NO: 156453 - protein, 10 aa, synthetic construct
STQRGDFNNT

SEQ ID NO: 156454 - protein, 10 aa, synthetic construct
STSRGDFNNT

SEQ ID NO: 156455 - protein, 10 aa, synthetic construct
STTRGDFNNT

SEQ ID NO: 156456 - protein, 10 aa, synthetic construct
STFRGDFNNT

SEQ ID NO: 156457 - protein, 10 aa, synthetic construct
STGRGDFNNT

SEQ ID NO: 156458 - protein, 10 aa, synthetic construct
STHRGDFNNT

SEQ ID NO: 156459 - protein, 10 aa, synthetic construct
STIRGDFNNT

SEQ ID NO: 156460 - protein, 10 aa, synthetic construct
STKRGDFNNT

SEQ ID NO: 156461 - protein, 10 aa, synthetic construct
STLRGDFNNT

SEQ ID NO: 156462 - protein, 10 aa, synthetic construct
STMRGDFNNT

SEQ ID NO: 156463 - protein, 10 aa, synthetic construct
STPRGDFNNT

SEQ ID NO: 156464 - protein, 10 aa, synthetic construct
STRRGDFNNT

SEQ ID NO: 156465 - protein, 10 aa, synthetic construct
STVRGDFNNT

SEQ ID NO: 156466 - protein, 10 aa, synthetic construct
STWRGDFNNT

SEQ ID NO: 156467 - protein, 10 aa, synthetic construct
STYRGDFNNT

SEQ ID NO: 156468 - protein, 10 aa, synthetic construct
SFARGDFNNT

SEQ ID NO: 156469 - protein, 10 aa, synthetic construct
SFDRGDFNNT

SEQ ID NO: 156470 - protein, 10 aa, synthetic construct
SFERGDFNNT

SEQ ID NO: 156471 - protein, 10 aa, synthetic construct
SFNRGDFNNT

SEQ ID NO: 156472 - protein, 10 aa, synthetic construct
SFQRGDFNNT

SEQ ID NO: 156473 - protein, 10 aa, synthetic construct
SFSRGDFNNT

SEQ ID NO: 156474 - protein, 10 aa, synthetic construct
SFTRGDFNNT

SEQ ID NO: 156475 - protein, 10 aa, synthetic construct
SFFRGDFNNT

SEQ ID NO: 156476 - protein, 10 aa, synthetic construct
SFGRGDFNNT

SEQ ID NO: 156477 - protein, 10 aa, synthetic construct
SFHRGDFNNT

SEQ ID NO: 156478 - protein, 10 aa, synthetic construct
SFIRGDFNNT

SEQ ID NO: 156479 - protein, 10 aa, synthetic construct
SFKRGDFNNT

SEQ ID NO: 156480 - protein, 10 aa, synthetic construct
SFLRGDFNNT

SEQ ID NO: 156481 - protein, 10 aa, synthetic construct
SFMRGDFNNT

SEQ ID NO: 156482 - protein, 10 aa, synthetic construct
SFPRGDFNNT

SEQ ID NO: 156483 - protein, 10 aa, synthetic construct
SFRRGDFNNT

SEQ ID NO: 156484 - protein, 10 aa, synthetic construct
SFVRGDFNNT

SEQ ID NO: 156485 - protein, 10 aa, synthetic construct
SFWRGDFNNT

SEQ ID NO: 156486 - protein, 10 aa, synthetic construct
SFYRGDFNNT

SEQ ID NO: 156487 - protein, 10 aa, synthetic construct
SGARGDFNNT

SEQ ID NO: 156488 - protein, 10 aa, synthetic construct
SGDRGDFNNT

SEQ ID NO: 156489 - protein, 10 aa, synthetic construct
SGERGDFNNT

SEQ ID NO: 156490 - protein, 10 aa, synthetic construct
SGNRGDFNNT

SEQ ID NO: 156491 - protein, 10 aa, synthetic construct
SGQRGDFNNT

SEQ ID NO: 156492 - protein, 10 aa, synthetic construct
SGSRGDFNNT

SEQ ID NO: 156493 - protein, 10 aa, synthetic construct
SGTRGDFNNT

SEQ ID NO: 156494 - protein, 10 aa, synthetic construct
SGFRGDFNNT

SEQ ID NO: 156495 - protein, 10 aa, synthetic construct
SGGRGDFNNT

SEQ ID NO: 156496 - protein, 10 aa, synthetic construct
SGHRGDFNNT

SEQ ID NO: 156497 - protein, 10 aa, synthetic construct
SGIRGDFNNT

SEQ ID NO: 156498 - protein, 10 aa, synthetic construct
SGKRGDFNNT

SEQ ID NO: 156499 - protein, 10 aa, synthetic construct
SGLRGDFNNT

SEQ ID NO: 156500 - protein, 10 aa, synthetic construct
SGMRGDFNNT

SEQ ID NO: 156501 - protein, 10 aa, synthetic construct
SGPRGDFNNT

SEQ ID NO: 156502 - protein, 10 aa, synthetic construct
SGRRGDFNNT

SEQ ID NO: 156503 - protein, 10 aa, synthetic construct
SGVRGDFNNT

SEQ ID NO: 156504 - protein, 10 aa, synthetic construct
SGWRGDFNNT

SEQ ID NO: 156505 - protein, 10 aa, synthetic construct
SGYRGDFNNT

SEQ ID NO: 156506 - protein, 10 aa, synthetic construct
SHARGDFNNT

SEQ ID NO: 156507 - protein, 10 aa, synthetic construct
SHDRGDFNNT

SEQ ID NO: 156508 - protein, 10 aa, synthetic construct
SHERGDFNNT

SEQ ID NO: 156509 - protein, 10 aa, synthetic construct
SHNRGDFNNT

SEQ ID NO: 156510 - protein, 10 aa, synthetic construct
SHQRGDFNNT

SEQ ID NO: 156511 - protein, 10 aa, synthetic construct
SHSRGDFNNT

SEQ ID NO: 156512 - protein, 10 aa, synthetic construct
SHTRGDFNNT

SEQ ID NO: 156513 - protein, 10 aa, synthetic construct
SHFRGDFNNT

SEQ ID NO: 156514 - protein, 10 aa, synthetic construct
SHGRGDFNNT

SEQ ID NO: 156515 - protein, 10 aa, synthetic construct
SHHRGDFNNT

SEQ ID NO: 156516 - protein, 10 aa, synthetic construct
SHIRGDFNNT

SEQ ID NO: 156517 - protein, 10 aa, synthetic construct
SHKRGDFNNT

SEQ ID NO: 156518 - protein, 10 aa, synthetic construct
SHLRGDFNNT

SEQ ID NO: 156519 - protein, 10 aa, synthetic construct
SHMRGDFNNT

SEQ ID NO: 156520 - protein, 10 aa, synthetic construct
SHPRGDFNNT

SEQ ID NO: 156521 - protein, 10 aa, synthetic construct
SHRRGDFNNT

SEQ ID NO: 156522 - protein, 10 aa, synthetic construct
SHVRGDFNNT

SEQ ID NO: 156523 - protein, 10 aa, synthetic construct
SHWRGDFNNT

SEQ ID NO: 156524 - protein, 10 aa, synthetic construct
SHYRGDFNNT

SEQ ID NO: 156525 - protein, 10 aa, synthetic construct
SIARGDFNNT

SEQ ID NO: 156526 - protein, 10 aa, synthetic construct
SIDRGDFNNT

SEQ ID NO: 156527 - protein, 10 aa, synthetic construct
SIERGDFNNT

SEQ ID NO: 156528 - protein, 10 aa, synthetic construct
SINRGDFNNT

SEQ ID NO: 156529 - protein, 10 aa, synthetic construct
SIQRGDFNNT

SEQ ID NO: 156530 - protein, 10 aa, synthetic construct
SISRGDFNNT

SEQ ID NO: 156531 - protein, 10 aa, synthetic construct
SITRGDFNNT

SEQ ID NO: 156532 - protein, 10 aa, synthetic construct
SIFRGDFNNT

SEQ ID NO: 156533 - protein, 10 aa, synthetic construct
SIGRGDFNNT

SEQ ID NO: 156534 - protein, 10 aa, synthetic construct
SIHRGDFNNT

SEQ ID NO: 156535 - protein, 10 aa, synthetic construct
SIIRGDFNNT

SEQ ID NO: 156536 - protein, 10 aa, synthetic construct
SIKRGDFNNT

SEQ ID NO: 156537 - protein, 10 aa, synthetic construct
SILRGDFNNT

SEQ ID NO: 156538 - protein, 10 aa, synthetic construct
SIMRGDFNNT

SEQ ID NO: 156539 - protein, 10 aa, synthetic construct
SIPRGDFNNT

SEQ ID NO: 156540 - protein, 10 aa, synthetic construct
SIRRGDFNNT

SEQ ID NO: 156541 - protein, 10 aa, synthetic construct
SIVRGDFNNT

SEQ ID NO: 156542 - protein, 10 aa, synthetic construct
SIWRGDFNNT

SEQ ID NO: 156543 - protein, 10 aa, synthetic construct
SIYRGDFNNT

SEQ ID NO: 156544 - protein, 10 aa, synthetic construct
SKARGDFNNT

SEQ ID NO: 156545 - protein, 10 aa, synthetic construct
SKDRGDFNNT

SEQ ID NO: 156546 - protein, 10 aa, synthetic construct
SKERGDFNNT

SEQ ID NO: 156547 - protein, 10 aa, synthetic construct
SKNRGDFNNT

SEQ ID NO: 156548 - protein, 10 aa, synthetic construct
SKQRGDFNNT

SEQ ID NO: 156549 - protein, 10 aa, synthetic construct
SKSRGDFNNT

SEQ ID NO: 156550 - protein, 10 aa, synthetic construct
SKTRGDFNNT

SEQ ID NO: 156551 - protein, 10 aa, synthetic construct
SKFRGDFNNT

SEQ ID NO: 156552 - protein, 10 aa, synthetic construct
SKGRGDFNNT

SEQ ID NO: 156553 - protein, 10 aa, synthetic construct
SKHRGDFNNT

SEQ ID NO: 156554 - protein, 10 aa, synthetic construct
SKIRGDFNNT

SEQ ID NO: 156555 - protein, 10 aa, synthetic construct
SKKRGDFNNT

SEQ ID NO: 156556 - protein, 10 aa, synthetic construct
SKLRGDFNNT

SEQ ID NO: 156557 - protein, 10 aa, synthetic construct
SKMRGDFNNT

SEQ ID NO: 156558 - protein, 10 aa, synthetic construct
SKPRGDFNNT

SEQ ID NO: 156559 - protein, 10 aa, synthetic construct
SKRRGDFNNT

SEQ ID NO: 156560 - protein, 10 aa, synthetic construct
SKVRGDFNNT

SEQ ID NO: 156561 - protein, 10 aa, synthetic construct
SKWRGDFNNT

SEQ ID NO: 156562 - protein, 10 aa, synthetic construct
SKYRGDFNNT

SEQ ID NO: 156563 - protein, 10 aa, synthetic construct
SLARGDFNNT

SEQ ID NO: 156564 - protein, 10 aa, synthetic construct
SLDRGDFNNT

SEQ ID NO: 156565 - protein, 10 aa, synthetic construct
SLERGDFNNT

SEQ ID NO: 156566 - protein, 10 aa, synthetic construct
SLNRGDFNNT

SEQ ID NO: 156567 - protein, 10 aa, synthetic construct
SLQRGDFNNT

SEQ ID NO: 156568 - protein, 10 aa, synthetic construct
SLSRGDFNNT

SEQ ID NO: 156569 - protein, 10 aa, synthetic construct
SLTRGDFNNT

SEQ ID NO: 156570 - protein, 10 aa, synthetic construct
SLFRGDFNNT

SEQ ID NO: 156571 - protein, 10 aa, synthetic construct
SLGRGDFNNT

SEQ ID NO: 156572 - protein, 10 aa, synthetic construct
SLHRGDFNNT

SEQ ID NO: 156573 - protein, 10 aa, synthetic construct
SLIRGDFNNT

SEQ ID NO: 156574 - protein, 10 aa, synthetic construct
SLKRGDFNNT

SEQ ID NO: 156575 - protein, 10 aa, synthetic construct
SLLRGDFNNT

SEQ ID NO: 156576 - protein, 10 aa, synthetic construct
SLMRGDFNNT

SEQ ID NO: 156577 - protein, 10 aa, synthetic construct
SLPRGDFNNT

SEQ ID NO: 156578 - protein, 10 aa, synthetic construct
SLRRGDFNNT

SEQ ID NO: 156579 - protein, 10 aa, synthetic construct
SLVRGDFNNT

SEQ ID NO: 156580 - protein, 10 aa, synthetic construct
SLWRGDFNNT

SEQ ID NO: 156581 - protein, 10 aa, synthetic construct
SLYRGDFNNT

SEQ ID NO: 156582 - protein, 10 aa, synthetic construct
SMARGDFNNT

SEQ ID NO: 156583 - protein, 10 aa, synthetic construct
SMDRGDFNNT

SEQ ID NO: 156584 - protein, 10 aa, synthetic construct
SMERGDFNNT

SEQ ID NO: 156585 - protein, 10 aa, synthetic construct
SMNRGDFNNT

SEQ ID NO: 156586 - protein, 10 aa, synthetic construct
SMQRGDFNNT

SEQ ID NO: 156587 - protein, 10 aa, synthetic construct
SMSRGDFNNT

SEQ ID NO: 156588 - protein, 10 aa, synthetic construct
SMTRGDFNNT

SEQ ID NO: 156589 - protein, 10 aa, synthetic construct
SMFRGDFNNT

SEQ ID NO: 156590 - protein, 10 aa, synthetic construct
SMGRGDFNNT

SEQ ID NO: 156591 - protein, 10 aa, synthetic construct
SMHRGDFNNT

SEQ ID NO: 156592 - protein, 10 aa, synthetic construct
SMIRGDFNNT

SEQ ID NO: 156593 - protein, 10 aa, synthetic construct
SMKRGDFNNT

SEQ ID NO: 156594 - protein, 10 aa, synthetic construct
SMLRGDFNNT

SEQ ID NO: 156595 - protein, 10 aa, synthetic construct
SMMRGDFNNT

SEQ ID NO: 156596 - protein, 10 aa, synthetic construct
SMPRGDFNNT

SEQ ID NO: 156597 - protein, 10 aa, synthetic construct
SMRRGDFNNT

SEQ ID NO: 156598 - protein, 10 aa, synthetic construct
SMVRGDFNNT

SEQ ID NO: 156599 - protein, 10 aa, synthetic construct
SMWRGDFNNT

SEQ ID NO: 156600 - protein, 10 aa, synthetic construct
SMYRGDFNNT

SEQ ID NO: 156601 - protein, 10 aa, synthetic construct
SPARGDFNNT

SEQ ID NO: 156602 - protein, 10 aa, synthetic construct
SPDRGDFNNT

SEQ ID NO: 156603 - protein, 10 aa, synthetic construct
SPERGDFNNT

SEQ ID NO: 156604 - protein, 10 aa, synthetic construct
SPNRGDFNNT

SEQ ID NO: 156605 - protein, 10 aa, synthetic construct
SPQRGDFNNT

SEQ ID NO: 156606 - protein, 10 aa, synthetic construct
SPSRGDFNNT

SEQ ID NO: 156607 - protein, 10 aa, synthetic construct
SPTRGDFNNT

SEQ ID NO: 156608 - protein, 10 aa, synthetic construct
SPFRGDFNNT

SEQ ID NO: 156609 - protein, 10 aa, synthetic construct
SPGRGDFNNT

SEQ ID NO: 156610 - protein, 10 aa, synthetic construct
SPHRGDFNNT

SEQ ID NO: 156611 - protein, 10 aa, synthetic construct
SPIRGDFNNT

SEQ ID NO: 156612 - protein, 10 aa, synthetic construct
SPKRGDFNNT

SEQ ID NO: 156613 - protein, 10 aa, synthetic construct
SPLRGDFNNT

SEQ ID NO: 156614 - protein, 10 aa, synthetic construct
SPMRGDFNNT

SEQ ID NO: 156615 - protein, 10 aa, synthetic construct
SPPRGDFNNT

SEQ ID NO: 156616 - protein, 10 aa, synthetic construct
SPRRGDFNNT

SEQ ID NO: 156617 - protein, 10 aa, synthetic construct
SPVRGDFNNT

SEQ ID NO: 156618 - protein, 10 aa, synthetic construct
SPWRGDFNNT

SEQ ID NO: 156619 - protein, 10 aa, synthetic construct
SPYRGDFNNT

SEQ ID NO: 156620 - protein, 10 aa, synthetic construct
SRARGDFNNT

SEQ ID NO: 156621 - protein, 10 aa, synthetic construct
SRDRGDFNNT

SEQ ID NO: 156622 - protein, 10 aa, synthetic construct
SRERGDFNNT

SEQ ID NO: 156623 - protein, 10 aa, synthetic construct
SRNRGDFNNT

SEQ ID NO: 156624 - protein, 10 aa, synthetic construct
SRQRGDFNNT

SEQ ID NO: 156625 - protein, 10 aa, synthetic construct
SRSRGDFNNT

SEQ ID NO: 156626 - protein, 10 aa, synthetic construct
SRTRGDFNNT

SEQ ID NO: 156627 - protein, 10 aa, synthetic construct
SRFRGDFNNT

SEQ ID NO: 156628 - protein, 10 aa, synthetic construct
SRGRGDFNNT

SEQ ID NO: 156629 - protein, 10 aa, synthetic construct
SRHRGDFNNT

SEQ ID NO: 156630 - protein, 10 aa, synthetic construct
SRIRGDFNNT

SEQ ID NO: 156631 - protein, 10 aa, synthetic construct
SRKRGDFNNT

SEQ ID NO: 156632 - protein, 10 aa, synthetic construct
SRLRGDFNNT

SEQ ID NO: 156633 - protein, 10 aa, synthetic construct
SRMRGDFNNT

SEQ ID NO: 156634 - protein, 10 aa, synthetic construct
SRPRGDFNNT

SEQ ID NO: 156635 - protein, 10 aa, synthetic construct
SRRRGDFNNT

SEQ ID NO: 156636 - protein, 10 aa, synthetic construct
SRVRGDFNNT

SEQ ID NO: 156637 - protein, 10 aa, synthetic construct
SRWRGDFNNT

SEQ ID NO: 156638 - protein, 10 aa, synthetic construct
SRYRGDFNNT

SEQ ID NO: 156639 - protein, 10 aa, synthetic construct
SVARGDFNNT

SEQ ID NO: 156640 - protein, 10 aa, synthetic construct
SVDRGDFNNT

SEQ ID NO: 156641 - protein, 10 aa, synthetic construct
SVERGDFNNT

SEQ ID NO: 156642 - protein, 10 aa, synthetic construct
SVNRGDFNNT

SEQ ID NO: 156643 - protein, 10 aa, synthetic construct
SVQRGDFNNT

SEQ ID NO: 156644 - protein, 10 aa, synthetic construct
SVSRGDFNNT

SEQ ID NO: 156645 - protein, 10 aa, synthetic construct
SVTRGDFNNT

SEQ ID NO: 156646 - protein, 10 aa, synthetic construct
SVFRGDFNNT

SEQ ID NO: 156647 - protein, 10 aa, synthetic construct
SVGRGDFNNT

SEQ ID NO: 156648 - protein, 10 aa, synthetic construct
SVHRGDFNNT

SEQ ID NO: 156649 - protein, 10 aa, synthetic construct
SVIRGDFNNT

SEQ ID NO: 156650 - protein, 10 aa, synthetic construct
SVKRGDFNNT

SEQ ID NO: 156651 - protein, 10 aa, synthetic construct
SVLRGDFNNT

SEQ ID NO: 156652 - protein, 10 aa, synthetic construct
SVMRGDFNNT

SEQ ID NO: 156653 - protein, 10 aa, synthetic construct
SVPRGDFNNT

SEQ ID NO: 156654 - protein, 10 aa, synthetic construct
SVRRGDFNNT

SEQ ID NO: 156655 - protein, 10 aa, synthetic construct
SVVRGDFNNT

SEQ ID NO: 156656 - protein, 10 aa, synthetic construct
SVWRGDFNNT

SEQ ID NO: 156657 - protein, 10 aa, synthetic construct
SVYRGDFNNT

SEQ ID NO: 156658 - protein, 10 aa, synthetic construct
SWARGDFNNT

SEQ ID NO: 156659 - protein, 10 aa, synthetic construct
SWDRGDFNNT

SEQ ID NO: 156660 - protein, 10 aa, synthetic construct
SWERGDFNNT

SEQ ID NO: 156661 - protein, 10 aa, synthetic construct
SWNRGDFNNT

SEQ ID NO: 156662 - protein, 10 aa, synthetic construct
SWQRGDFNNT

SEQ ID NO: 156663 - protein, 10 aa, synthetic construct
SWSRGDFNNT

SEQ ID NO: 156664 - protein, 10 aa, synthetic construct
SWTRGDFNNT

SEQ ID NO: 156665 - protein, 10 aa, synthetic construct
SWFRGDFNNT

SEQ ID NO: 156666 - protein, 10 aa, synthetic construct
SWGRGDFNNT

SEQ ID NO: 156667 - protein, 10 aa, synthetic construct
SWHRGDFNNT

SEQ ID NO: 156668 - protein, 10 aa, synthetic construct
SWIRGDFNNT

SEQ ID NO: 156669 - protein, 10 aa, synthetic construct
SWKRGDFNNT

SEQ ID NO: 156670 - protein, 10 aa, synthetic construct
SWLRGDFNNT

SEQ ID NO: 156671 - protein, 10 aa, synthetic construct
SWMRGDFNNT

SEQ ID NO: 156672 - protein, 10 aa, synthetic construct
SWPRGDFNNT

SEQ ID NO: 156673 - protein, 10 aa, synthetic construct
SWRRGDFNNT

SEQ ID NO: 156674 - protein, 10 aa, synthetic construct
SWVRGDFNNT

SEQ ID NO: 156675 - protein, 10 aa, synthetic construct
SWWRGDFNNT

SEQ ID NO: 156676 - protein, 10 aa, synthetic construct
SWYRGDFNNT

SEQ ID NO: 156677 - protein, 10 aa, synthetic construct
SYARGDFNNT

SEQ ID NO: 156678 - protein, 10 aa, synthetic construct
SYDRGDFNNT

SEQ ID NO: 156679 - protein, 10 aa, synthetic construct
SYERGDFNNT

SEQ ID NO: 156680 - protein, 10 aa, synthetic construct
SYNRGDFNNT

SEQ ID NO: 156681 - protein, 10 aa, synthetic construct
SYQRGDFNNT

SEQ ID NO: 156682 - protein, 10 aa, synthetic construct
SYSRGDFNNT

SEQ ID NO: 156683 - protein, 10 aa, synthetic construct
SYTRGDFNNT

SEQ ID NO: 156684 - protein, 10 aa, synthetic construct
SYFRGDFNNT

SEQ ID NO: 156685 - protein, 10 aa, synthetic construct
SYGRGDFNNT

SEQ ID NO: 156686 - protein, 10 aa, synthetic construct
SYHRGDFNNT

SEQ ID NO: 156687 - protein, 10 aa, synthetic construct
SYIRGDFNNT

SEQ ID NO: 156688 - protein, 10 aa, synthetic construct
SYKRGDFNNT

SEQ ID NO: 156689 - protein, 10 aa, synthetic construct
SYLRGDFNNT

SEQ ID NO: 156690 - protein, 10 aa, synthetic construct
SYMRGDFNNT

SEQ ID NO: 156691 - protein, 10 aa, synthetic construct
SYPRGDFNNT

SEQ ID NO: 156692 - protein, 10 aa, synthetic construct
SYRRGDFNNT

SEQ ID NO: 156693 - protein, 10 aa, synthetic construct
SYVRGDFNNT

SEQ ID NO: 156694 - protein, 10 aa, synthetic construct
SYWRGDFNNT

SEQ ID NO: 156695 - protein, 10 aa, synthetic construct
SYYRGDFNNT

SEQ ID NO: 156696 - protein, 10 aa, synthetic construct
TAARGDFNNT

SEQ ID NO: 156697 - protein, 10 aa, synthetic construct
TADRGDFNNT

SEQ ID NO: 156698 - protein, 10 aa, synthetic construct
TAERGDFNNT

SEQ ID NO: 156699 - protein, 10 aa, synthetic construct
TANRGDFNNT

SEQ ID NO: 156700 - protein, 10 aa, synthetic construct
TAQRGDFNNT

SEQ ID NO: 156701 - protein, 10 aa, synthetic construct
TASRGDFNNT

SEQ ID NO: 156702 - protein, 10 aa, synthetic construct
TATRGDFNNT

SEQ ID NO: 156703 - protein, 10 aa, synthetic construct
TAFRGDFNNT

SEQ ID NO: 156704 - protein, 10 aa, synthetic construct
TAGRGDFNNT

SEQ ID NO: 156705 - protein, 10 aa, synthetic construct
TAHRGDFNNT

SEQ ID NO: 156706 - protein, 10 aa, synthetic construct
TAIRGDFNNT

SEQ ID NO: 156707 - protein, 10 aa, synthetic construct
TAKRGDFNNT

SEQ ID NO: 156708 - protein, 10 aa, synthetic construct
TALRGDFNNT

SEQ ID NO: 156709 - protein, 10 aa, synthetic construct
TAMRGDFNNT

SEQ ID NO: 156710 - protein, 10 aa, synthetic construct
TAPRGDFNNT

SEQ ID NO: 156711 - protein, 10 aa, synthetic construct
TARRGDFNNT

SEQ ID NO: 156712 - protein, 10 aa, synthetic construct
TAVRGDFNNT

SEQ ID NO: 156713 - protein, 10 aa, synthetic construct
TAWRGDFNNT

SEQ ID NO: 156714 - protein, 10 aa, synthetic construct
TAYRGDFNNT

SEQ ID NO: 156715 - protein, 10 aa, synthetic construct
TDARGDFNNT

SEQ ID NO: 156716 - protein, 10 aa, synthetic construct
TDDRGDFNNT

SEQ ID NO: 156717 - protein, 10 aa, synthetic construct
TDERGDFNNT

SEQ ID NO: 156718 - protein, 10 aa, synthetic construct
TDNRGDFNNT

SEQ ID NO: 156719 - protein, 10 aa, synthetic construct
TDQRGDFNNT

SEQ ID NO: 156720 - protein, 10 aa, synthetic construct
TDSRGDFNNT

SEQ ID NO: 156721 - protein, 10 aa, synthetic construct
TDTRGDFNNT

SEQ ID NO: 156722 - protein, 10 aa, synthetic construct
TDFRGDFNNT

SEQ ID NO: 156723 - protein, 10 aa, synthetic construct
TDGRGDFNNT

SEQ ID NO: 156724 - protein, 10 aa, synthetic construct
TDHRGDFNNT

SEQ ID NO: 156725 - protein, 10 aa, synthetic construct
TDIRGDFNNT

SEQ ID NO: 156726 - protein, 10 aa, synthetic construct
TDKRGDFNNT

SEQ ID NO: 156727 - protein, 10 aa, synthetic construct
TDLRGDFNNT

SEQ ID NO: 156728 - protein, 10 aa, synthetic construct
TDMRGDFNNT

SEQ ID NO: 156729 - protein, 10 aa, synthetic construct
TDPRGDFNNT

SEQ ID NO: 156730 - protein, 10 aa, synthetic construct
TDRRGDFNNT

SEQ ID NO: 156731 - protein, 10 aa, synthetic construct
TDVRGDFNNT

SEQ ID NO: 156732 - protein, 10 aa, synthetic construct
TDWRGDFNNT

SEQ ID NO: 156733 - protein, 10 aa, synthetic construct
TDYRGDFNNT

SEQ ID NO: 156734 - protein, 10 aa, synthetic construct
TEARGDFNNT

SEQ ID NO: 156735 - protein, 10 aa, synthetic construct
TEDRGDFNNT

SEQ ID NO: 156736 - protein, 10 aa, synthetic construct
TEERGDFNNT

SEQ ID NO: 156737 - protein, 10 aa, synthetic construct
TENRGDFNNT

SEQ ID NO: 156738 - protein, 10 aa, synthetic construct
TEQRGDFNNT

SEQ ID NO: 156739 - protein, 10 aa, synthetic construct
TESRGDFNNT

SEQ ID NO: 156740 - protein, 10 aa, synthetic construct
TETRGDFNNT

SEQ ID NO: 156741 - protein, 10 aa, synthetic construct
TEFRGDFNNT

SEQ ID NO: 156742 - protein, 10 aa, synthetic construct
TEGRGDFNNT

SEQ ID NO: 156743 - protein, 10 aa, synthetic construct
TEHRGDFNNT

SEQ ID NO: 156744 - protein, 10 aa, synthetic construct
TEIRGDFNNT

SEQ ID NO: 156745 - protein, 10 aa, synthetic construct
TEKRGDFNNT

SEQ ID NO: 156746 - protein, 10 aa, synthetic construct
TELRGDFNNT

SEQ ID NO: 156747 - protein, 10 aa, synthetic construct
TEMRGDFNNT

SEQ ID NO: 156748 - protein, 10 aa, synthetic construct
TEPRGDFNNT

SEQ ID NO: 156749 - protein, 10 aa, synthetic construct
TERRGDFNNT

SEQ ID NO: 156750 - protein, 10 aa, synthetic construct
TEVRGDFNNT

SEQ ID NO: 156751 - protein, 10 aa, synthetic construct
TEWRGDFNNT

SEQ ID NO: 156752 - protein, 10 aa, synthetic construct
TEYRGDFNNT

SEQ ID NO: 156753 - protein, 10 aa, synthetic construct
TNARGDFNNT

SEQ ID NO: 156754 - protein, 10 aa, synthetic construct
TNDRGDFNNT

SEQ ID NO: 156755 - protein, 10 aa, synthetic construct
TNERGDFNNT

SEQ ID NO: 156756 - protein, 10 aa, synthetic construct
TNNRGDFNNT

SEQ ID NO: 156757 - protein, 10 aa, synthetic construct
TNQRGDFNNT

SEQ ID NO: 156758 - protein, 10 aa, synthetic construct
TNSRGDFNNT

SEQ ID NO: 156759 - protein, 10 aa, synthetic construct
TNTRGDFNNT

SEQ ID NO: 156760 - protein, 10 aa, synthetic construct
TNFRGDFNNT

SEQ ID NO: 156761 - protein, 10 aa, synthetic construct
TNGRGDFNNT

SEQ ID NO: 156762 - protein, 10 aa, synthetic construct
TNHRGDFNNT

SEQ ID NO: 156763 - protein, 10 aa, synthetic construct
TNIRGDFNNT

SEQ ID NO: 156764 - protein, 10 aa, synthetic construct
TNKRGDFNNT

SEQ ID NO: 156765 - protein, 10 aa, synthetic construct
TNLRGDFNNT

SEQ ID NO: 156766 - protein, 10 aa, synthetic construct
TNMRGDFNNT

SEQ ID NO: 156767 - protein, 10 aa, synthetic construct
TNPRGDFNNT

SEQ ID NO: 156768 - protein, 10 aa, synthetic construct
TNRRGDFNNT

SEQ ID NO: 156769 - protein, 10 aa, synthetic construct
TNVRGDFNNT

SEQ ID NO: 156770 - protein, 10 aa, synthetic construct
TNWRGDFNNT

SEQ ID NO: 156771 - protein, 10 aa, synthetic construct
TNYRGDFNNT

SEQ ID NO: 156772 - protein, 10 aa, synthetic construct
TQARGDFNNT

SEQ ID NO: 156773 - protein, 10 aa, synthetic construct
TQDRGDFNNT

SEQ ID NO: 156774 - protein, 10 aa, synthetic construct
TQERGDFNNT

SEQ ID NO: 156775 - protein, 10 aa, synthetic construct
TQNRGDFNNT

SEQ ID NO: 156776 - protein, 10 aa, synthetic construct
TQQRGDFNNT

SEQ ID NO: 156777 - protein, 10 aa, synthetic construct
TQSRGDFNNT

SEQ ID NO: 156778 - protein, 10 aa, synthetic construct
TQTRGDFNNT

SEQ ID NO: 156779 - protein, 10 aa, synthetic construct
TQFRGDFNNT

SEQ ID NO: 156780 - protein, 10 aa, synthetic construct
TQGRGDFNNT

SEQ ID NO: 156781 - protein, 10 aa, synthetic construct
TQHRGDFNNT

SEQ ID NO: 156782 - protein, 10 aa, synthetic construct
TQIRGDFNNT

SEQ ID NO: 156783 - protein, 10 aa, synthetic construct
TQKRGDFNNT

SEQ ID NO: 156784 - protein, 10 aa, synthetic construct
TQLRGDFNNT

SEQ ID NO: 156785 - protein, 10 aa, synthetic construct
TQMRGDFNNT

SEQ ID NO: 156786 - protein, 10 aa, synthetic construct
TQPRGDFNNT

SEQ ID NO: 156787 - protein, 10 aa, synthetic construct
TQRRGDFNNT

SEQ ID NO: 156788 - protein, 10 aa, synthetic construct
TQVRGDFNNT

SEQ ID NO: 156789 - protein, 10 aa, synthetic construct
TQWRGDFNNT

SEQ ID NO: 156790 - protein, 10 aa, synthetic construct
TQYRGDFNNT

SEQ ID NO: 156791 - protein, 10 aa, synthetic construct
TSARGDFNNT

SEQ ID NO: 156792 - protein, 10 aa, synthetic construct
TSDRGDFNNT

SEQ ID NO: 156793 - protein, 10 aa, synthetic construct
TSERGDFNNT

SEQ ID NO: 156794 - protein, 10 aa, synthetic construct
TSNRGDFNNT

SEQ ID NO: 156795 - protein, 10 aa, synthetic construct
TSQRGDFNNT

SEQ ID NO: 156796 - protein, 10 aa, synthetic construct
TSSRGDFNNT

SEQ ID NO: 156797 - protein, 10 aa, synthetic construct
TSTRGDFNNT

SEQ ID NO: 156798 - protein, 10 aa, synthetic construct
TSFRGDFNNT

SEQ ID NO: 156799 - protein, 10 aa, synthetic construct
TSGRGDFNNT

SEQ ID NO: 156800 - protein, 10 aa, synthetic construct
TSHRGDFNNT

SEQ ID NO: 156801 - protein, 10 aa, synthetic construct
TSIRGDFNNT

SEQ ID NO: 156802 - protein, 10 aa, synthetic construct
TSKRGDFNNT

SEQ ID NO: 156803 - protein, 10 aa, synthetic construct
TSLRGDFNNT

SEQ ID NO: 156804 - protein, 10 aa, synthetic construct
TSMRGDFNNT

SEQ ID NO: 156805 - protein, 10 aa, synthetic construct
TSPRGDFNNT

SEQ ID NO: 156806 - protein, 10 aa, synthetic construct
TSRRGDFNNT

SEQ ID NO: 156807 - protein, 10 aa, synthetic construct
TSVRGDFNNT

SEQ ID NO: 156808 - protein, 10 aa, synthetic construct
TSWRGDFNNT

SEQ ID NO: 156809 - protein, 10 aa, synthetic construct
TSYRGDFNNT

SEQ ID NO: 156810 - protein, 10 aa, synthetic construct
TTARGDFNNT

SEQ ID NO: 156811 - protein, 10 aa, synthetic construct
TTDRGDFNNT

SEQ ID NO: 156812 - protein, 10 aa, synthetic construct
TTERGDFNNT

SEQ ID NO: 156813 - protein, 10 aa, synthetic construct
TTNRGDFNNT

SEQ ID NO: 156814 - protein, 10 aa, synthetic construct
TTQRGDFNNT

SEQ ID NO: 156815 - protein, 10 aa, synthetic construct
TTSRGDFNNT

SEQ ID NO: 156816 - protein, 10 aa, synthetic construct
TTTRGDFNNT

SEQ ID NO: 156817 - protein, 10 aa, synthetic construct
TTFRGDFNNT

SEQ ID NO: 156818 - protein, 10 aa, synthetic construct
TTGRGDFNNT

SEQ ID NO: 156819 - protein, 10 aa, synthetic construct
TTHRGDFNNT

SEQ ID NO: 156820 - protein, 10 aa, synthetic construct
TTIRGDFNNT

SEQ ID NO: 156821 - protein, 10 aa, synthetic construct
TTKRGDFNNT

SEQ ID NO: 156822 - protein, 10 aa, synthetic construct
TTLRGDFNNT

SEQ ID NO: 156823 - protein, 10 aa, synthetic construct
TTMRGDFNNT

SEQ ID NO: 156824 - protein, 10 aa, synthetic construct
TTPRGDFNNT

SEQ ID NO: 156825 - protein, 10 aa, synthetic construct
TTRRGDFNNT

SEQ ID NO: 156826 - protein, 10 aa, synthetic construct
TTVRGDFNNT

SEQ ID NO: 156827 - protein, 10 aa, synthetic construct
TTWRGDFNNT

SEQ ID NO: 156828 - protein, 10 aa, synthetic construct
TTYRGDFNNT

SEQ ID NO: 156829 - protein, 10 aa, synthetic construct
TFARGDFNNT

SEQ ID NO: 156830 - protein, 10 aa, synthetic construct
TFDRGDFNNT

SEQ ID NO: 156831 - protein, 10 aa, synthetic construct
TFERGDFNNT

SEQ ID NO: 156832 - protein, 10 aa, synthetic construct
TFNRGDFNNT

SEQ ID NO: 156833 - protein, 10 aa, synthetic construct
TFQRGDFNNT

SEQ ID NO: 156834 - protein, 10 aa, synthetic construct
TFSRGDFNNT

SEQ ID NO: 156835 - protein, 10 aa, synthetic construct
TFTRGDFNNT

SEQ ID NO: 156836 - protein, 10 aa, synthetic construct
TFFRGDFNNT

SEQ ID NO: 156837 - protein, 10 aa, synthetic construct
TFGRGDFNNT

SEQ ID NO: 156838 - protein, 10 aa, synthetic construct
TFHRGDFNNT

SEQ ID NO: 156839 - protein, 10 aa, synthetic construct
TFIRGDFNNT

SEQ ID NO: 156840 - protein, 10 aa, synthetic construct
TFKRGDFNNT

SEQ ID NO: 156841 - protein, 10 aa, synthetic construct
TFLRGDFNNT

SEQ ID NO: 156842 - protein, 10 aa, synthetic construct
TFMRGDFNNT

SEQ ID NO: 156843 - protein, 10 aa, synthetic construct
TFPRGDFNNT

SEQ ID NO: 156844 - protein, 10 aa, synthetic construct
TFRRGDFNNT

SEQ ID NO: 156845 - protein, 10 aa, synthetic construct
TFVRGDFNNT

SEQ ID NO: 156846 - protein, 10 aa, synthetic construct
TFWRGDFNNT

SEQ ID NO: 156847 - protein, 10 aa, synthetic construct
TFYRGDFNNT

SEQ ID NO: 156848 - protein, 10 aa, synthetic construct
TGARGDFNNT

SEQ ID NO: 156849 - protein, 10 aa, synthetic construct
TGDRGDFNNT

SEQ ID NO: 156850 - protein, 10 aa, synthetic construct
TGERGDFNNT

SEQ ID NO: 156851 - protein, 10 aa, synthetic construct
TGNRGDFNNT

SEQ ID NO: 156852 - protein, 10 aa, synthetic construct
TGQRGDFNNT

SEQ ID NO: 156853 - protein, 10 aa, synthetic construct
TGSRGDFNNT

SEQ ID NO: 156854 - protein, 10 aa, synthetic construct
TGTRGDFNNT

SEQ ID NO: 156855 - protein, 10 aa, synthetic construct
TGFRGDFNNT

SEQ ID NO: 156856 - protein, 10 aa, synthetic construct
TGGRGDFNNT

SEQ ID NO: 156857 - protein, 10 aa, synthetic construct
TGHRGDFNNT

SEQ ID NO: 156858 - protein, 10 aa, synthetic construct
TGIRGDFNNT

SEQ ID NO: 156859 - protein, 10 aa, synthetic construct
TGKRGDFNNT

SEQ ID NO: 156860 - protein, 10 aa, synthetic construct
TGLRGDFNNT

SEQ ID NO: 156861 - protein, 10 aa, synthetic construct
TGMRGDFNNT

SEQ ID NO: 156862 - protein, 10 aa, synthetic construct
TGPRGDFNNT

SEQ ID NO: 156863 - protein, 10 aa, synthetic construct
TGRRGDFNNT

SEQ ID NO: 156864 - protein, 10 aa, synthetic construct
TGVRGDFNNT

SEQ ID NO: 156865 - protein, 10 aa, synthetic construct
TGWRGDFNNT

SEQ ID NO: 156866 - protein, 10 aa, synthetic construct
TGYRGDFNNT

SEQ ID NO: 156867 - protein, 10 aa, synthetic construct
THARGDFNNT

SEQ ID NO: 156868 - protein, 10 aa, synthetic construct
THDRGDFNNT

SEQ ID NO: 156869 - protein, 10 aa, synthetic construct
THERGDFNNT

SEQ ID NO: 156870 - protein, 10 aa, synthetic construct
THNRGDFNNT

SEQ ID NO: 156871 - protein, 10 aa, synthetic construct
THQRGDFNNT

SEQ ID NO: 156872 - protein, 10 aa, synthetic construct
THSRGDFNNT

SEQ ID NO: 156873 - protein, 10 aa, synthetic construct
THTRGDFNNT

SEQ ID NO: 156874 - protein, 10 aa, synthetic construct
THFRGDFNNT

SEQ ID NO: 156875 - protein, 10 aa, synthetic construct
THGRGDFNNT

SEQ ID NO: 156876 - protein, 10 aa, synthetic construct
THHRGDFNNT

SEQ ID NO: 156877 - protein, 10 aa, synthetic construct
THIRGDFNNT

SEQ ID NO: 156878 - protein, 10 aa, synthetic construct
THKRGDFNNT

SEQ ID NO: 156879 - protein, 10 aa, synthetic construct
THLRGDFNNT

SEQ ID NO: 156880 - protein, 10 aa, synthetic construct
THMRGDFNNT

SEQ ID NO: 156881 - protein, 10 aa, synthetic construct
THPRGDFNNT

SEQ ID NO: 156882 - protein, 10 aa, synthetic construct
THRRGDFNNT

SEQ ID NO: 156883 - protein, 10 aa, synthetic construct
THVRGDFNNT

SEQ ID NO: 156884 - protein, 10 aa, synthetic construct
THWRGDFNNT

SEQ ID NO: 156885 - protein, 10 aa, synthetic construct
THYRGDFNNT

SEQ ID NO: 156886 - protein, 10 aa, synthetic construct
TIARGDFNNT

SEQ ID NO: 156887 - protein, 10 aa, synthetic construct
TIDRGDFNNT

SEQ ID NO: 156888 - protein, 10 aa, synthetic construct
TIERGDFNNT

SEQ ID NO: 156889 - protein, 10 aa, synthetic construct
TINRGDFNNT

SEQ ID NO: 156890 - protein, 10 aa, synthetic construct
TIQRGDFNNT

SEQ ID NO: 156891 - protein, 10 aa, synthetic construct
TISRGDFNNT

SEQ ID NO: 156892 - protein, 10 aa, synthetic construct
TITRGDFNNT

SEQ ID NO: 156893 - protein, 10 aa, synthetic construct
TIFRGDFNNT

SEQ ID NO: 156894 - protein, 10 aa, synthetic construct
TIGRGDFNNT

SEQ ID NO: 156895 - protein, 10 aa, synthetic construct
TIHRGDFNNT

SEQ ID NO: 156896 - protein, 10 aa, synthetic construct
TIIRGDFNNT

SEQ ID NO: 156897 - protein, 10 aa, synthetic construct
TIKRGDFNNT

SEQ ID NO: 156898 - protein, 10 aa, synthetic construct
TILRGDFNNT

SEQ ID NO: 156899 - protein, 10 aa, synthetic construct
TIMRGDFNNT

SEQ ID NO: 156900 - protein, 10 aa, synthetic construct
TIPRGDFNNT

SEQ ID NO: 156901 - protein, 10 aa, synthetic construct
TIRRGDFNNT

SEQ ID NO: 156902 - protein, 10 aa, synthetic construct
TIVRGDFNNT

SEQ ID NO: 156903 - protein, 10 aa, synthetic construct
TIWRGDFNNT

SEQ ID NO: 156904 - protein, 10 aa, synthetic construct
TIYRGDFNNT

SEQ ID NO: 156905 - protein, 10 aa, synthetic construct
TKARGDFNNT

SEQ ID NO: 156906 - protein, 10 aa, synthetic construct
TKDRGDFNNT

SEQ ID NO: 156907 - protein, 10 aa, synthetic construct
TKERGDFNNT

SEQ ID NO: 156908 - protein, 10 aa, synthetic construct
TKNRGDFNNT

SEQ ID NO: 156909 - protein, 10 aa, synthetic construct
TKQRGDFNNT

SEQ ID NO: 156910 - protein, 10 aa, synthetic construct
TKSRGDFNNT

SEQ ID NO: 156911 - protein, 10 aa, synthetic construct
TKTRGDFNNT

SEQ ID NO: 156912 - protein, 10 aa, synthetic construct
TKFRGDFNNT

SEQ ID NO: 156913 - protein, 10 aa, synthetic construct
TKGRGDFNNT

SEQ ID NO: 156914 - protein, 10 aa, synthetic construct
TKHRGDFNNT

SEQ ID NO: 156915 - protein, 10 aa, synthetic construct
TKIRGDFNNT

SEQ ID NO: 156916 - protein, 10 aa, synthetic construct
TKKRGDFNNT

SEQ ID NO: 156917 - protein, 10 aa, synthetic construct
TKLRGDFNNT

SEQ ID NO: 156918 - protein, 10 aa, synthetic construct
TKMRGDFNNT

SEQ ID NO: 156919 - protein, 10 aa, synthetic construct
TKPRGDFNNT

SEQ ID NO: 156920 - protein, 10 aa, synthetic construct
TKRRGDFNNT

SEQ ID NO: 156921 - protein, 10 aa, synthetic construct
TKVRGDFNNT

SEQ ID NO: 156922 - protein, 10 aa, synthetic construct
TKWRGDFNNT

SEQ ID NO: 156923 - protein, 10 aa, synthetic construct
TKYRGDFNNT

SEQ ID NO: 156924 - protein, 10 aa, synthetic construct
TLARGDFNNT

SEQ ID NO: 156925 - protein, 10 aa, synthetic construct
TLDRGDFNNT

SEQ ID NO: 156926 - protein, 10 aa, synthetic construct
TLERGDFNNT

SEQ ID NO: 156927 - protein, 10 aa, synthetic construct
TLNRGDFNNT

SEQ ID NO: 156928 - protein, 10 aa, synthetic construct
TLQRGDFNNT

SEQ ID NO: 156929 - protein, 10 aa, synthetic construct
TLSRGDFNNT

SEQ ID NO: 156930 - protein, 10 aa, synthetic construct
TLTRGDFNNT

SEQ ID NO: 156931 - protein, 10 aa, synthetic construct
TLFRGDFNNT

SEQ ID NO: 156932 - protein, 10 aa, synthetic construct
TLGRGDFNNT

SEQ ID NO: 156933 - protein, 10 aa, synthetic construct
TLHRGDFNNT

SEQ ID NO: 156934 - protein, 10 aa, synthetic construct
TLIRGDFNNT

SEQ ID NO: 156935 - protein, 10 aa, synthetic construct
TLKRGDFNNT

SEQ ID NO: 156936 - protein, 10 aa, synthetic construct
TLLRGDFNNT

SEQ ID NO: 156937 - protein, 10 aa, synthetic construct
TLMRGDFNNT

SEQ ID NO: 156938 - protein, 10 aa, synthetic construct
TLPRGDFNNT

SEQ ID NO: 156939 - protein, 10 aa, synthetic construct
TLRRGDFNNT

SEQ ID NO: 156940 - protein, 10 aa, synthetic construct
TLVRGDFNNT

SEQ ID NO: 156941 - protein, 10 aa, synthetic construct
TLWRGDFNNT

SEQ ID NO: 156942 - protein, 10 aa, synthetic construct
TLYRGDFNNT

SEQ ID NO: 156943 - protein, 10 aa, synthetic construct
TMARGDFNNT

SEQ ID NO: 156944 - protein, 10 aa, synthetic construct
TMDRGDFNNT

SEQ ID NO: 156945 - protein, 10 aa, synthetic construct
TMERGDFNNT

SEQ ID NO: 156946 - protein, 10 aa, synthetic construct
TMNRGDFNNT

SEQ ID NO: 156947 - protein, 10 aa, synthetic construct
TMQRGDFNNT

SEQ ID NO: 156948 - protein, 10 aa, synthetic construct
TMSRGDFNNT

SEQ ID NO: 156949 - protein, 10 aa, synthetic construct
TMTRGDFNNT

SEQ ID NO: 156950 - protein, 10 aa, synthetic construct
TMFRGDFNNT

SEQ ID NO: 156951 - protein, 10 aa, synthetic construct
TMGRGDFNNT

SEQ ID NO: 156952 - protein, 10 aa, synthetic construct
TMHRGDFNNT

SEQ ID NO: 156953 - protein, 10 aa, synthetic construct
TMIRGDFNNT

SEQ ID NO: 156954 - protein, 10 aa, synthetic construct
TMKRGDFNNT

SEQ ID NO: 156955 - protein, 10 aa, synthetic construct
TMLRGDFNNT

SEQ ID NO: 156956 - protein, 10 aa, synthetic construct
TMMRGDFNNT

SEQ ID NO: 156957 - protein, 10 aa, synthetic construct
TMPRGDFNNT

SEQ ID NO: 156958 - protein, 10 aa, synthetic construct
TMRRGDFNNT

SEQ ID NO: 156959 - protein, 10 aa, synthetic construct
TMVRGDFNNT

SEQ ID NO: 156960 - protein, 10 aa, synthetic construct
TMWRGDFNNT

SEQ ID NO: 156961 - protein, 10 aa, synthetic construct
TMYRGDFNNT

SEQ ID NO: 156962 - protein, 10 aa, synthetic construct
TPARGDFNNT

SEQ ID NO: 156963 - protein, 10 aa, synthetic construct
TPDRGDFNNT

SEQ ID NO: 156964 - protein, 10 aa, synthetic construct
TPERGDFNNT

SEQ ID NO: 156965 - protein, 10 aa, synthetic construct
TPNRGDFNNT

SEQ ID NO: 156966 - protein, 10 aa, synthetic construct
TPQRGDFNNT

SEQ ID NO: 156967 - protein, 10 aa, synthetic construct
TPSRGDFNNT

SEQ ID NO: 156968 - protein, 10 aa, synthetic construct
TPTRGDFNNT

SEQ ID NO: 156969 - protein, 10 aa, synthetic construct
TPFRGDFNNT

SEQ ID NO: 156970 - protein, 10 aa, synthetic construct
TPGRGDFNNT

SEQ ID NO: 156971 - protein, 10 aa, synthetic construct
TPHRGDFNNT

SEQ ID NO: 156972 - protein, 10 aa, synthetic construct
TPIRGDFNNT

SEQ ID NO: 156973 - protein, 10 aa, synthetic construct
TPKRGDFNNT

SEQ ID NO: 156974 - protein, 10 aa, synthetic construct
TPLRGDFNNT

SEQ ID NO: 156975 - protein, 10 aa, synthetic construct
TPMRGDFNNT

SEQ ID NO: 156976 - protein, 10 aa, synthetic construct
TPPRGDFNNT

SEQ ID NO: 156977 - protein, 10 aa, synthetic construct
TPRRGDFNNT

SEQ ID NO: 156978 - protein, 10 aa, synthetic construct
TPVRGDFNNT

SEQ ID NO: 156979 - protein, 10 aa, synthetic construct
TPWRGDFNNT

SEQ ID NO: 156980 - protein, 10 aa, synthetic construct
TPYRGDFNNT

SEQ ID NO: 156981 - protein, 10 aa, synthetic construct
TRARGDFNNT

SEQ ID NO: 156982 - protein, 10 aa, synthetic construct
TRDRGDFNNT

SEQ ID NO: 156983 - protein, 10 aa, synthetic construct
TRERGDFNNT

SEQ ID NO: 156984 - protein, 10 aa, synthetic construct
TRNRGDFNNT

SEQ ID NO: 156985 - protein, 10 aa, synthetic construct
TRQRGDFNNT

SEQ ID NO: 156986 - protein, 10 aa, synthetic construct
TRSRGDFNNT

SEQ ID NO: 156987 - protein, 10 aa, synthetic construct
TRTRGDFNNT

SEQ ID NO: 156988 - protein, 10 aa, synthetic construct
TRFRGDFNNT

SEQ ID NO: 156989 - protein, 10 aa, synthetic construct
TRGRGDFNNT

SEQ ID NO: 156990 - protein, 10 aa, synthetic construct
TRHRGDFNNT

SEQ ID NO: 156991 - protein, 10 aa, synthetic construct
TRIRGDFNNT

SEQ ID NO: 156992 - protein, 10 aa, synthetic construct
TRKRGDFNNT

SEQ ID NO: 156993 - protein, 10 aa, synthetic construct
TRLRGDFNNT

SEQ ID NO: 156994 - protein, 10 aa, synthetic construct
TRMRGDFNNT

SEQ ID NO: 156995 - protein, 10 aa, synthetic construct
TRPRGDFNNT

SEQ ID NO: 156996 - protein, 10 aa, synthetic construct
TRRRGDFNNT

SEQ ID NO: 156997 - protein, 10 aa, synthetic construct
TRVRGDFNNT

SEQ ID NO: 156998 - protein, 10 aa, synthetic construct
TRWRGDFNNT

SEQ ID NO: 156999 - protein, 10 aa, synthetic construct
TRYRGDFNNT

SEQ ID NO: 157000 - protein, 10 aa, synthetic construct
TVARGDFNNT

SEQ ID NO: 157001 - protein, 10 aa, synthetic construct
TVDRGDFNNT

SEQ ID NO: 157002 - protein, 10 aa, synthetic construct
TVERGDFNNT

SEQ ID NO: 157003 - protein, 10 aa, synthetic construct
TVNRGDFNNT

SEQ ID NO: 157004 - protein, 10 aa, synthetic construct
TVQRGDFNNT

SEQ ID NO: 157005 - protein, 10 aa, synthetic construct
TVSRGDFNNT

SEQ ID NO: 157006 - protein, 10 aa, synthetic construct
TVTRGDFNNT

SEQ ID NO: 157007 - protein, 10 aa, synthetic construct
TVFRGDFNNT

SEQ ID NO: 157008 - protein, 10 aa, synthetic construct
TVGRGDFNNT

SEQ ID NO: 157009 - protein, 10 aa, synthetic construct
TVHRGDFNNT

SEQ ID NO: 157010 - protein, 10 aa, synthetic construct
TVIRGDFNNT

SEQ ID NO: 157011 - protein, 10 aa, synthetic construct
TVKRGDFNNT

SEQ ID NO: 157012 - protein, 10 aa, synthetic construct
TVLRGDFNNT

SEQ ID NO: 157013 - protein, 10 aa, synthetic construct
TVMRGDFNNT

SEQ ID NO: 157014 - protein, 10 aa, synthetic construct
TVPRGDFNNT

SEQ ID NO: 157015 - protein, 10 aa, synthetic construct
TVRRGDFNNT

SEQ ID NO: 157016 - protein, 10 aa, synthetic construct
TVVRGDFNNT

SEQ ID NO: 157017 - protein, 10 aa, synthetic construct
TVWRGDFNNT

SEQ ID NO: 157018 - protein, 10 aa, synthetic construct
TVYRGDFNNT

SEQ ID NO: 157019 - protein, 10 aa, synthetic construct
TWARGDFNNT

SEQ ID NO: 157020 - protein, 10 aa, synthetic construct
TWDRGDFNNT

SEQ ID NO: 157021 - protein, 10 aa, synthetic construct
TWERGDFNNT

SEQ ID NO: 157022 - protein, 10 aa, synthetic construct
TWNRGDFNNT

SEQ ID NO: 157023 - protein, 10 aa, synthetic construct
TWQRGDFNNT

SEQ ID NO: 157024 - protein, 10 aa, synthetic construct
TWSRGDFNNT

SEQ ID NO: 157025 - protein, 10 aa, synthetic construct
TWTRGDFNNT

SEQ ID NO: 157026 - protein, 10 aa, synthetic construct
TWFRGDFNNT

SEQ ID NO: 157027 - protein, 10 aa, synthetic construct
TWGRGDFNNT

SEQ ID NO: 157028 - protein, 10 aa, synthetic construct
TWHRGDFNNT

SEQ ID NO: 157029 - protein, 10 aa, synthetic construct
TWIRGDFNNT

SEQ ID NO: 157030 - protein, 10 aa, synthetic construct
TWKRGDFNNT

SEQ ID NO: 157031 - protein, 10 aa, synthetic construct
TWLRGDFNNT

SEQ ID NO: 157032 - protein, 10 aa, synthetic construct
TWMRGDFNNT

SEQ ID NO: 157033 - protein, 10 aa, synthetic construct
TWPRGDFNNT

SEQ ID NO: 157034 - protein, 10 aa, synthetic construct
TWRRGDFNNT

SEQ ID NO: 157035 - protein, 10 aa, synthetic construct
TWVRGDFNNT

SEQ ID NO: 157036 - protein, 10 aa, synthetic construct
TWWRGDFNNT

SEQ ID NO: 157037 - protein, 10 aa, synthetic construct
TWYRGDFNNT

SEQ ID NO: 157038 - protein, 10 aa, synthetic construct
TYARGDFNNT

SEQ ID NO: 157039 - protein, 10 aa, synthetic construct
TYDRGDFNNT

SEQ ID NO: 157040 - protein, 10 aa, synthetic construct
TYERGDFNNT

SEQ ID NO: 157041 - protein, 10 aa, synthetic construct
TYNRGDFNNT

SEQ ID NO: 157042 - protein, 10 aa, synthetic construct
TYQRGDFNNT

SEQ ID NO: 157043 - protein, 10 aa, synthetic construct
TYSRGDFNNT

SEQ ID NO: 157044 - protein, 10 aa, synthetic construct
TYTRGDFNNT

SEQ ID NO: 157045 - protein, 10 aa, synthetic construct
TYFRGDFNNT

SEQ ID NO: 157046 - protein, 10 aa, synthetic construct
TYGRGDFNNT

SEQ ID NO: 157047 - protein, 10 aa, synthetic construct
TYHRGDFNNT

SEQ ID NO: 157048 - protein, 10 aa, synthetic construct
TYIRGDFNNT

SEQ ID NO: 157049 - protein, 10 aa, synthetic construct
TYKRGDFNNT

SEQ ID NO: 157050 - protein, 10 aa, synthetic construct
TYLRGDFNNT

SEQ ID NO: 157051 - protein, 10 aa, synthetic construct
TYMRGDFNNT

SEQ ID NO: 157052 - protein, 10 aa, synthetic construct
TYPRGDFNNT

SEQ ID NO: 157053 - protein, 10 aa, synthetic construct
TYRRGDFNNT

SEQ ID NO: 157054 - protein, 10 aa, synthetic construct
TYVRGDFNNT

SEQ ID NO: 157055 - protein, 10 aa, synthetic construct
TYWRGDFNNT

SEQ ID NO: 157056 - protein, 10 aa, synthetic construct
TYYRGDFNNT

SEQ ID NO: 157057 - protein, 10 aa, synthetic construct
SAQRGDHASW

SEQ ID NO: 157058 - protein, 7 aa, synthetic construct
  VARIANT 7: note = Any amino acid
RGDRGVX

SEQ ID NO: 157059 - protein, 7 aa, synthetic construct
  VARIANT 7: note = Any amino acid
RGDRGSX

SEQ ID NO: 157060 - protein, 7 aa, synthetic construct
  VARIANT 7: note = Any amino acid
RGDRGNX

SEQ ID NO: 157061 - protein, 7 aa, synthetic construct
  VARIANT 7: note = Any amino acid
RGDRGGX

SEQ ID NO: 157062 - protein, 7 aa, synthetic construct
  VARIANT 7: note = Any amino acid
RGDRGQX

SEQ ID NO: 157063 - protein, 7 aa, synthetic construct
  VARIANT 6: note = Any amino acid
RGDRGXV

SEQ ID NO: 157064 - protein, 7 aa, synthetic construct
  VARIANT 6: note = Any amino acid
RGDRGXI

SEQ ID NO: 157065 - protein, 7 aa, synthetic construct
  VARIANT 6: note = Any amino acid
RGDRGXS

SEQ ID NO: 157066 - protein, 7 aa, synthetic construct
  VARIANT 6: note = Any amino acid
RGDRGXL

SEQ ID NO: 157067 - protein, 7 aa, synthetic construct
  VARIANT 6: note = Any amino acid
RGDRGXQ

SEQ ID NO: 157068 - protein, 7 aa, synthetic construct
  VARIANT 5: note = Any amino acid
  VARIANT 6: note = Any amino acid
RGDHXXL

SEQ ID NO: 157069 - protein, 7 aa, synthetic construct
  VARIANT 5: note = Any amino acid
  VARIANT 6: note = Any amino acid
RGDRXXI

SEQ ID NO: 157070 - protein, 7 aa, synthetic construct
  VARIANT 5: note = Any amino acid
  VARIANT 6: note = Any amino acid
RGDRXXV

SEQ ID NO: 157071 - protein, 7 aa, synthetic construct
  VARIANT 5: note = Any amino acid
  VARIANT 6: note = Any amino acid
RGDRXXL

SEQ ID NO: 157072 - protein, 7 aa, synthetic construct
  VARIANT 5: note = Any amino acid
  VARIANT 6: note = Any amino acid
RGDYXXL

SEQ ID NO: 157073 - protein, 7 aa, synthetic construct
  VARIANT 5: note = Any amino acid
  VARIANT 6: note = Any amino acid
RGDYXXV

SEQ ID NO: 157074 - protein, 7 aa, synthetic construct
  VARIANT 5: note = Any amino acid
  VARIANT 6: note = Any amino acid
RGDYXXM

SEQ ID NO: 157075 - protein, 7 aa, synthetic construct
  VARIANT 5: note = Any amino acid
  VARIANT 6: note = Any amino acid
RGDLXXT

SEQ ID NO: 157076 - protein, 7 aa, synthetic construct
  VARIANT 6: note = Any amino acid
RGDRSXI

SEQ ID NO: 157077 - protein, 7 aa, synthetic construct
  VARIANT 6: note = Any amino acid
RGDRGXI

SEQ ID NO: 157078 - protein, 7 aa, synthetic construct
  VARIANT 6: note = Any amino acid
RGDRSXV

SEQ ID NO: 157079 - protein, 7 aa, synthetic construct
  VARIANT 6: note = Any amino acid
RGDRGXV

SEQ ID NO: 157080 - protein, 7 aa, synthetic construct
RGDRMVF

SEQ ID NO: 157081 - protein, 7 aa, synthetic construct
RGDRTVI

SEQ ID NO: 157082 - protein, 7 aa, synthetic construct
SRGDRPM

SEQ ID NO: 157083 - protein, 7 aa, synthetic construct
ISLRGDR
